(19) United States
(12) Patent Application Publication
(10) Pub. No.: US 2007/0014810 A1
(43) Pub. Date: Jan. 18, 2007

(54) Inducing cellular immune responses to human papillomavirus using peptide and nucleic acid compositions

(76) Inventors: Denise Baker, Poway, CA (US); Scott D. Power, San Bruno, CA (US); Mark J. Newman, Carlsbad, CA (US); Robert Chesnut, Cardiff-by-the Sea, CA (US); Scott Southwood, Santee, CA (US); Bianca Mothe, Oceanside, CA (US); Manley T.F. Huang, Palo Alto, CA (US); Lilia Maria Babe, Emerald Hills, CA (US); Lawrence M. DeYoung, Montara, CA (US); Yiyou Chen, San Jose, CA (US)

Correspondence Address: STERNE, KESSLER, GOLDSTEIN & FOX PLLC, 1100 NEW YORK AVENUE, N.W., WASHINGTON, DC, 20005, US

(21) Appl. No.: 11/027,670

(22) Filed: Jan. 3, 2005

Related U.S. Application Data
(60) Provisional application No. 60/584,652, filed on Jul. 2, 2004.
(60) Provisional application No. 60/533,211, filed on Dec. 31, 2003.

(51) Int. Cl. C12Q 1/70; C07H 21/04; A61K 39/12; C12N 7/00; C07K 14/025

(52) U.S. Cl. 424/186.1; 435/5; 435/235.1; 530/350; 536/23.72

(57) ABSTRACT

This invention uses our knowledge of the mechanisms by which antigen is recognized by T cells to identify and prepare human papillomavirus (HPV) epitopes, and to develop epitope-based vaccines directed towards HPV. More specifically, this application communicates our discovery of pharmaceutical compositions and methods of use in the prevention and treatment of HPV infection.

### CROSS-REFERENCE TO RELATED APPLICATIONS

[0001] This application claims the benefit of U.S. Provisional Application No. 60/533,211, filed Dec. 31, 2003, and U.S. Provisional Application No. 60/584,652, filed Jul. 2, 2004, both of which are incoporated herein by reference.

[0002] This application may be relevant to U.S. Ser. No. 09/189,702 filed Nov. 10, 1998, which is a CIP of U.S. Ser. No. 08/205,713 filed Mar. 4, 1994, which is a CIP of Ser. No. 08/159,184 filed Nov. 29, 1993 and now abandoned, which is a CIP of Ser. No. 08/073,205 filed Jun. 4, 1993 and now abandoned, which is a CIP of Ser. No. 08/027,146 filed Mar. 5, 1993 and now abandoned. The present application is also related to U.S. Ser. No. 09/226,775, which is a CIP of U.S. Ser. No. 08/815,396, which claims the benefit of U.S. Ser. No. 60/013,113, now abandoned. Furthermore, the present application is related to U.S. Ser. No. 09/017,735, which is a CIP of abandoned U.S. Ser. No. 08/589,108; U.S. Ser. No. 08/753,622, U.S. Ser. No. 08/822,382, abandoned U.S. Ser. No. 60/013,980, U.S. Ser. No. 08/454,033, U.S. Ser. No. 09/116,424, and U.S. Ser. No. 08/349,177. The present application is also related to U.S. Ser. No. 09/017,524, U.S. Ser. No. 08/821,739, abandoned U.S. Ser. No. 60/013,833, U.S. Ser. No. 08/758,409, U.S. Ser. No. 08/589,107, U.S. Ser. No. 08/451,913, U.S. Ser. No. 08/186,266, U.S. Ser. No. 09/116,061, and U.S. Ser. No. 08/347,610, which is a CIP of U.S. Ser. No. 08/159,339, which is a CIP of abandoned U.S. Ser. No. 08/103,396, which is a CIP of abandoned U.S. Ser. No. 08/027,746, which is a CIP of abandoned U.S. Ser. No. 07/926,666. The present application may also be relevant to U.S. Ser. No. 09/017,743, U.S. Ser. No. 08/753,615; U.S. Ser. No. 08/590,298, U.S. Ser. No. 09/115,400, and U.S. Ser. No. 08/452,843, which is a CIP of U.S. Ser. No. 08/344,824, which is a CIP of abandoned U.S. Ser. No. 08/278,634. The present application may also be related to provisional U.S. Ser. No. 60/087,192 and U.S. Ser. No. 09/009,953, which is a CIP of abandoned U.S. Ser. No. 60/036,713 and abandoned U.S. Ser. No. 60/037,432. In addition, the present application may be relevant to U.S. Ser. No. 09/098,584, and U.S. Ser. No. 09/239,043. The present application may also be relevant to co-pending U.S. Ser. No. 09/583,200 filed May 30, 2000, U.S. Ser. No. 09/260,714 filed Mar. 1, 1999, and U.S. Provisional Application No. 60/239,008, filed Oct. 6, 2000, and U.S. Provisional Application No. 60/166,529, filed Nov. 18, 1999. In addition, the present application may also be relevant to U.S. Provisional Application No. 60/239,008, filed Oct. 6, 2000, now abandoned; co-pending U.S. application Ser. No. 10/130,548, which is the U.S. Natl. Phase Application of PCT/US00/31856, filed Nov. 20, 2000 and published as WO 01/36452 on May 25, 2001; and co-pending U.S. application Ser. No. 10/116,118, filed Apr. 5, 2002. Each of the above applications is incorporated herein by reference.

### BACKGROUND OF THE INVENTION

[0003] Human papillomavirus (HPV) is a member of the papillomaviridae, a group of small DNA viruses that infect a variety of higher vertebrates. More than 80 types of HPVs have been identified. Of these, more than 30 can infect the genital tract. Some types, generally types 6 and 11, may cause genital warts, which are typically benign and rarely develop into cancer. Other strains of HPV, “cancer-associated”, or “high-risk” types, can more frequently lead to the development of cancer. The primary mode of transmission of these strains of HPV is through sexual contact.

[0004] The main manifestations of the genital warts are cauliflower-like condylomata acuminata that usually involve moist surfaces; keratotic and smooth papular warts, usually on dry surfaces; and subclinical “flat” warts, which are found on any mucosal or cutaneous surface (Handsfield, H., Am. J. Med. 102(5A):16-20 (1997)). These warts are typically benign but are a source of inter-individual spread of the virus (Ponten, J. and Guo, Z., Cancer Surv. 32:201-229 (1998)). At least three HPV strains associated with genital warts have been identified: type 6a (see, e.g., Hofmann, K. J., et al., Virology 209(2):506-518 (1995)), type 6b (see, e.g., Hofmann, K. J., et al., Virology 209(2):506-518 (1995)) and type 11 (see, e.g., Dartmann, K., et al., Virology 151(1):124-130 (1986)).

[0005] Cancer-associated HPVs have been linked with cancer in both men and women; they include, but are not limited to, HPV-16, HPV-18, HPV-31, HPV-33, HPV-45 and HPV-56. Other HPV strains, including types 6 and 11 as well as others, e.g., HPV-5 and HPV-8, are less frequently associated with cancer. The high risk types are typically associated with the development of cervical carcinoma and premalignant lesions of the cervix in women, but are also associated with similar malignant and premalignant lesions at other anatomic sites within the lower genital or anogenital tract. These lesions include neoplasia of the vagina, vulva, perineum, the penis, and the anus. HPV infection has also been associated with respiratory tract papillomas, and rarely, cancer, as well as abnormal growth or neoplasia in other epithelial tissues. See, e.g., Virology, 2nd Ed., Fields, et al., Eds. Raven Press, New York (1990), Chapters 58 and 59, for a review of HPV association with cancer.

[0006] The HPV genome consists of three functional regions, the early region, the late region, and the “long control region”. The early region gene products control viral replication, transcription and cellular transformation. They include the HPV E1 and E2 proteins, which play a role in HPV DNA replication, and the E6 and E7 oncoproteins, which are involved in the control of cellular proliferation. The late region include the genes that encode the structural proteins L1 and L2, which are the major and minor capsid proteins, respectively. The “long control region” contains such sequences as enhancer and promoter regulatory regions.

[0007] HPV expresses different proteins at different stages of the infection, for example early, as well as late, proteins. Even in latent infections, however, early proteins are often expressed and are therefore useful targets for vaccine-based therapies. For example, high-grade dysplasia and cervical squamous cell carcinoma continue to express E6 and E7, which therefore can be targeted to treat disease at both early and late stages of infection.

[0008] Treatment for HPV infection is often unsatisfactory because of persistence of virus after treatment and recurrence of clinically apparent disease is common. The treatment may require frequent visits to clinics and is not directed at elimination of the virus but at clearing warts. Because of persistence of virus after treatment, recurrence of clinically apparent disease is common.

[0009] Thus, a need exists for an efficacious vaccine to prevent and/or treat HPV infection and to prevent and/or treat cancer that is associated with HPV infection. Effective HPV vaccines would be a significant advance in the control of sexually transmissable infections and could also protect against clinical disease, particularly cancers such as cervical cancer. (see, e.g., Rowen, P. and Lacey, C., Dermatologic Clinics 16(4):835-838, 1998).

[0010] Virus-specific, human leukocyte antigen (HLA) class I-restricted cytotoxic T lymphocytes (CTL) are known to play a major role in the prevention and clearance of virus infections in vivo (Oldstone, et al., Nature 321:239, 1989; Jamieson, et al., J. Virol. 61:3930, 1987; Yap, et al., Nature 273:238, 1978; Lukacher, et al., J. Exp. Med. 160:814, 1994; McMichael, et al., N. Engl. J. Med. 309:13, 1983; Sethi, et al., J. Gen. Virol. 64:443, 1983; Watari, et al., J. Exp. Med. 165:459, 1987; Yasukawa, et al., J. Immunol. 143:2051, 1989; Tigges, et al., J. Virol. 66:1622, 1993; Reddenhase, et al., J. Virol. 55:263, 1985; Quinnan, et al., N. Engl. J. Med. 307:6, 1982). HLA class I molecules are expressed on the surface of almost all nucleated cells. Following intracellular processing of antigens, epitopes from the antigens are presented as a complex with the HLA class I molecules on the surface of such cells. CTL recognize the peptide-HLA class I complex, which then results in the destruction of the cell bearing the HLA-peptide complex directly by the CTL and/or via the activation of non-destructive mechanisms e.g., the production of interferon, that inhibit viral replication.

[0011] Virus-specific T helper lymphocytes are also known to be critical for maintaining effective immunity in chronic viral infections. Historically, HTL responses were viewed as primarily supporting the expansion of specific CTL and B cell populations; however, more recent data indicate that HTL may directly contribute to the control of virus replication. For example, a decline in CD4⁺ T cells and a corresponding loss in HTL function characterize infection with HIV (Lane, et al., N. Engl. J. Med. 313:79, 1985). Furthermore, studies in HIV infected patients have also shown that there is an inverse relationship between virus-specific HTL responses and viral load, suggesting that HTL plays a role in viremia (see, e.g., Rosenberg, et al., Science 278:1447, 1997).

[0012] The development of vaccines with prophylactic and/or therapeutic efficacy against HPV is ongoing. Early vaccine development was hampered by the inability to culture HPV. With the introduction of cloning techniques and protein expression, however, some attempts have been made to stimulate humoral and CTL response to HPV (See, e.g., Rowen, P. and Lacey, C., Dermatologic Clinics 16(4):835-838 (1998)). Studies to date, however, have been inconclusive.

[0013] Activation of T helper cells and cytotoxic lymphocytes (CTLs) in the development of vaccines has also been analyzed. Lehtinen, M., et al., for instance, has shown that some peptides from the E2 protein of HPV type 16 activate T helper cells and CTLs (Biochem. Biophys. Res. Comm. 209(2):541-6 (1995)). Similarly, Tarpey, et al., has shown that some peptides from HPV type 11 E7 protein can stimulate human HPV-specific CTLs in vitro (Immunology 81:222-227 (1994)) and Borysiewicz, et al. have reported a recombinant vaccinia virus expressing HPV 16 and HPV 17 E6 and E7 that stimulated CTL responses in at least one patient (Lancet 347:1347-57, 1996).

[0014] The epitope approach, as we describe herein, allows the incorporation of various antibody, CTL and HTL epitopes, from various proteins, in a single vaccine composition. Such a composition may simultaneously target multiple dominant and subdominant epitopes and thereby be used to achieve effective immunization in a diverse population.

[0015] The technology relevant to multi-epitope (“minigene”) vaccines is developing. Several independent studies have established that induction of simultaneous immune responses against multiple epitopes can be achieved. For example, responses against a large number of T cell specificities can be induced and detected. In natural situations, Doolan, et al. (Immunity, Vol. 7(1):97-112 (1997)) simultaneously detected recall T cell responses, against as many as 17 different P. falciparum epitopes using PBMC from a single donor. Similarly, Bertoni and colleagues (J. Clin. Invest., 100(3):503-13 (1997)) detected simultaneous CTL responses against 12 different HBV-derived epitopes in a single donor. In terms of immunization with multi-epitope nucleic acid vaccines, several examples have been reported where multiple T cell responses were induced. For example, minigene vaccines composed of approximately ten MRC Class I epitopes in which all epitopes were immunogenic and/or antigenic have been reported. Specifically, minigene vaccines composed of 9 EBV (Thomson, et al., Proc. Natl. Acad. Sci. USA, 92(13):5845-49 (1995)), 7 HIV (Woodberry, et al., J. Virol., 73(7):5320-25 (1999)), 10 murine (Thomson, et al., J. Immunol., 160(4):1717-23 (1998)) and 10 tumor-derived (Mateo, et al., J. Immunol., 163(7):4058-63 (1999)) epitopes have been shown to be active. It has also been shown that a multi-epitope DNA plasmid encoding nine different HLA-A2.1- and A11-restricted epitopes derived from HBV and HIV induced CTL against all epitopes (Ishioka, et al., J. Immunol., 162(7):3915-25 (1999)).

[0016] Recently, several multi-epitope DNA plasmid vaccines specific for HIV have entered clinical trials (Nanke, et al., Nature Med., 6:951-55 (2000); Wilson, C. C., et al., J. Immunol. 171(10):5611-23 (2003).

[0017] Thus, minigene vaccines containing multiple MHC Class I and Class II (i.e., CTL) epitopes can be designed, and presentation and recognition can be obtained for all epitopes. However, the immunogenicity of multi-epitope constructs appears to be strongly influenced by a number of variables, a number of which have heretofore been unknown. For example, the immunogenicity (or antigenicity) of the same epitope expressed in the context of different vaccine constructs can vary over several orders of magnitude. Thus, there exists a need to identify strategies to optimize multi-epitope vaccine constructs. Such optimization is important in terms of induction of potent immune responses and ultimately, for clinical efficacy. Accordingly, the present invention provides strategies to optimize antigenicity and immunogenicity of multi-epitope vaccines encompassing a large number of epitopes. The present invention also provides optimized multi-epitope vaccines, particularly minigene vaccines, generated in accordance with these strategies.

[0018] The following paragraphs provide a brief review of some of the main variables potentially influencing the immunogenicity, epitope processing, and presentation on antigen presenting cells (APCs) in association with Class I and Class II MHC molecules of one or more epitopes provided in a minigene construct.

[0019] Of the many thousand possible peptides that are encoded by a complex foreign pathogen, only a small fraction ends up in a peptide form capable of binding to MHC Class I antigens and thus of being recognized by T cells. This phenomenon, of obvious potential impact on the development of a multi-epitope vaccine, is known as immunodominance (Yewdell, et al., Ann. Rev. Immunol., 17:51-88 (1999)). Several major variables contribute to immunodominance. Herein, we describe variables affecting the generation of the appropriate peptides, both in qualitative and quantitative terms, as a result of intracellular processing.

[0020] A junctional epitope is defined as an epitope created due to the juxtaposition of two other epitopes. The junctional epitope is composed of a C-terminal section derived from a first epitope, and an N-terminal section derived from a second epitope. Creation of junctional epitopes is a potential problem in the design of multi-epitope minigene vaccines, for both Class I and Class II restricted epitopes for the following reasons. Firstly, when developing a minigene composed of, or containing, human epitopes, which are, typically tested for immunogenicity in HLA transgenic laboratory animals, the creation of murine epitopes could create undesired immunodominance effects. Secondly, the creation of new, unintended epitopes for human HLA Class I or Class II molecules could elicit in vaccine recipients, new T cell specificities that are not expressed by infected cells or tumors. These responses are by definition irrelevant and ineffective and could even be counterproductive to the intended vaccine response, by creating undesired immunodominance effects.

[0021] The existence of junctional epitopes has been documented in a variety of different experimental situations. Gefter and collaborators first demonstrated the effect in a system in which two different Class II restricted epitopes were juxtaposed and colinearly synthesized (Perkins, et al., J. Immunol., 146(7):2137-44 (1991)). The effect was so marked that the immune system recognition of the epitopes could be completely “silenced” by expression, processing, and immune response to these new junctional epitopes (Wang, et al., Cell Immunol., 143(2):284-97 (1992)). Helper T cells directed against junctional epitopes were also observed in humans as a result of immunization with a synthetic lipopeptide, which was composed of an HLA-A2-restricted HBV-derived immunodominant CTL epitope, and a universal Tetanus Toxoid-derived HTL epitope (Livingston, et al., J. Immunol., 159(3):1383-92 (1997)). Thus, the creation of junctional epitopes is a major consideration in the design of multi-epitope constructs.

[0022] In certain embodiments, the present invention provides methods of addressing this problem and avoiding or minimizing the occurrence of junctional epitopes.

[0023] Class I restricted epitopes are generated by a complex process (Yewdell, et al., Ann. Rev. Immunol., 17:51-88 (1999)). Limited proteolysis involving endoproteases and potential trimming by exoproteases is followed by translocation across the endoplasmic reticulum (ER) membrane by transporters associated with antigen processing (TAP) molecules. The major cytosolic protease complex involved in generation of antigenic peptides, and their precursors, is the proteosome (Niedermann, et al., Immunity, 2(3):289-99 (1995)), although ER trimming of CTL precursors has also been demonstrated (Paz, et al., Immunity, 11(2):241-51 (1999)). It has long been debated whether the residues immediately flanking the C- and N-termini of the epitope have an influence on the efficiency of epitope processing.

[0024] The yield and availability of processed epitope has been implicated as a major variable in determining immunogenicity and could thus clearly have a major impact on overall minigene potency in that the magnitude of immune response can be directly proportional to the amount of epitope bound by MHC and displayed for T cell recognition. Several studies have provided evidence that this is indeed the case. For example, induction of virus-specific CTL that is essentially proportional to epitope density (Wherry, et al., J. Immunol., 163(7):3735-45 (1999); Livingston, et. al., Vaccine, 19(32) 4652-60 (2001)) has been observed. Further, recombinant minigenes, which encode a preprocessed optimal epitope, have been used to induce higher levels of epitope expression than naturally observed with full-length protein (Anton, et al., J. Immunol., 158(6):2535-42 (1997)). In general, minigene priming has been shown to be more effective than priming with the whole antigen (Restifo, et al., J. Immunol., 154(9):4414-22 (1995); Ishioka, et al., J. Immunol., 162(7):3915-25 (1999)), even though some exceptions have been noted (Iwasaki, et al., Vaccine, 17(15-16):2081-88 (1999)).

[0025] Early studies concluded that residues within the epitope (Hahn, et al., J. Exp. Med., 176(5):1335-41 (1992)) primarily regulate immunogenicity. Similar conclusions were reached by other studies, mostly based on grafting an epitope into an unrelated gene, or in the same gene, but in a different location (Chimini, et al., J. Exp. Med., 169(1):297-302 (1989); Hahn, et al., J. Exp. Med., 174(3):733-36 (1991)). Other experiments however (Del Val, et al., Cell, 66(6):1145-53 (1991); Hahn, et al., J. Exp. Med., 176(5):1335-41 (1992)), suggested that residues localized directly adjacent to the CTL epitope can directly influence recognition (Couillin, et al., J. Exp. Med., 180(3):1129-34 (1994); Livingston, et al., Vaccine, 19(32) 4652-60 (2001)); Bergmann, et al., J. Virol., 68(8):5306-10 (1994)). In the context of minigene vaccines, the controversy has been renewed. Shastri and coworkers (J. Immunol., 155(9):4339-46 (1995)) found that T cell responses were not significantly affected by varying the N-terminal flanking residue but were inhibited by the addition of a single C-terminal flanking residue. The most dramatic inhibition was observed with isoleucine, leucine, cysteine, and proline as the C-terminal flanking residues. In contrast, Gileadi (Eur. J. Immunol., 29(7):2213-22 (1999)) reported profound effects as a function of the residues located at the N-terminus of mouse influenza virus epitopes. Bergmann and coworkers found that aromatic, basic and alanine residues supported efficient epitope recognition, while glycine and proline residues were strongly inhibitory (Bergmann, et al., J. Immunol., 157(8):3242-49 (1996)). In contrast, Lippolis (J. Virol., 69(5):3134-46 (1995)) concluded that substituting flanking residues did not effect recognition. However, Lippolis' observations may be tempered by the fact that only rather conservative substitutions were tested and such substituted residues are unlikely to affect proteosome specificity.

[0026] It appears that the specificity of these effects, and in general of natural epitopes, roughly correlates with proteosome specificity. For example, proteosome specificity is partly trypsin-like (Niedermann, et al., Immunity, 2(3):289-99 (1995)), with cleavage following basic amino acids. Nevertheless, efficient cleavage of the carboxyl side of hydrophobic and acidic residues is also possible. Consistent with these specificities are the studies of Sherman and collaborators, which found that an arginine to histidine mutation at the position following the C-terminus of a p53 epitope affects proteosome-mediated processing of the protein (Theobald, et al., J. Exp. Med., 188(6):1017-28 (1998)). Several other studies (Hanke, et al., J. Gen. Virol., 79 (Pt 1):83-90 (1998); Thomson, et al., Proc. Natl. Acad. Sci. USA, 92(13):5845-49 (1995)) indicated that minigenes can be constructed utilizing minimal epitopes, and that flanking sequences appear not to be required, although the potential for further optimization by the use of flanking regions was also acknowledged.

[0027] In sum, for HLA Class I epitopes, the effects of flanking regions on processing and presentation of CTL epitopes has yet to be fully defined. A systematic analysis of the effect of modulation of flanking regions has not been performed for minigene vaccines. Thus, analysis utilizing minigene vaccines encoding epitopes restricted by human Class I in general is needed. The present invention provides in part such an analysis of the effects of flanking regions on processing and presentation of CTL epitopes. Thus, in certain embodiments, the present invention provides multi-epitope vaccine constructs optimized from immunogenicity and antigenicity, and methods of designing such constructs.

[0028] HLA Class II peptide complexes are also generated as a result of a complex series of events distinct from HLA Class I processing. The processing pathway involves association with Invariant chain (Ii), its transport to specialized compartments, the degradation of Ii to CLIP, and HLA-DM catalyzed removal of CLIP (Blum, et al., Crit. Rev. Immunol., 17(5-6):411-17 (1997); and Arndt, et al., Immunol. Res., 16(3):261-72 (1997) for review. Moreover, there is a potentially crucial role of various cathepsins in general, and cathepsin S and L in particular, in Ii degradation (Nakagawa, et al., Immunity, 10(2):207-17 (1999)). In terms of generation of functional epitopes however, the process appears to be somewhat less selective (Chapman, H. A., Curr. Opin. Immunol., 10(1):93-102 (1998)), and peptides of many sizes can bind to MHC Class II (Hunt, et al., Science, 256(5065):1817-20 (1992)). Most or all of the possible peptides appear to be generated (Moudgil, et al., J. Immunol., 159(6):2574-49 (1997); and Thomson, et al., J. Virol., 72(3):2246-52 (1998)). Thus, as compared to the issue of flanking regions, the creation of junctional epitopes can be a more serious concern in particular embodiments.

[0029] One of the most formidable obstacles to the development of broadly efficacious epitope-based immunotherapeutics, however, has been the extreme polymorphism of HLA molecules. To date, effective non-genetically biased coverage of a population has been a task of considerable complexity; such coverage has required that epitopes be used that are specific for HLA molecules corresponding to each individual HLA allele. Impractically large numbers of epitopes would therefore have to be used in order to cover ethnically diverse populations. Thus, there has existed a need for peptide epitopes that are bound by multiple HLA antigen molecules for use in epitope-based vaccines. The greater the number of HLA antigen molecules bound, the greater the breadth of population coverage by the vaccine.

[0030] Furthermore, as described herein in greater detail, a need has existed to modulate peptide binding properties, e.g., so that peptides that are able to bind to multiple HLA antigens do so with an affinity that will stimulate an immune response. Identification of epitopes restricted by more than one HLA allele at an affinity that correlates with immunogenicity is important to provide thorough population coverage, and to allow the elicitation of responses of sufficient vigor to prevent or clear an infection in a diverse segment of the population. Such a response can also target a broad array of epitopes. In certain embodiments, the technology disclosed herein provides for such favored immune responses. The information provided in this section is intended to disclose the presently understood state of the art as of the filing date of the present application. Certain information is included in this section which was generated subsequent to the priority date of this application. Accordingly, information in this section is not intended, in any way, to delineate the priority date for the invention.

### SUMMARY OF THE INVENTION

[0031] This invention applies our knowledge of the mechanisms by which antigen is recognized by T cells, for example, to develop epitope-based vaccines directed towards HPV. More specifically, this application communicates our discovery of specific epitope compositions, specific epitope pharmaceutical compositions, and methods of use in the prevention and treatment of HPV infection, and/or HPV-associated cancers and other maladies.

[0032] The use of epitope-based vaccines has several advantages over current vaccines, particularly when compared to the use of whole antigens in vaccine compositions. There is evidence that the immune response to whole antigens is directed largely toward variable regions of the antigen, allowing for immune escape due to variability and/or mutations. The epitopes for inclusion in an epitope-based vaccine, such as those of the present invention, may be selected from conserved regions of viral or tumor-associated antigens, thereby reducing the likelihood of escape mutants. Furthermore, immunosuppressive epitopes that may be present in whole antigens can be avoided with the use of epitope-based vaccines, such as those of the present invention.

[0033] An additional advantage of the epitope-based vaccines and methods of the present invention, is the ability to combine selected epitopes (CTL and HTL), and further, to modify the composition of the epitopes, achieving, for example, enhanced immunogenicity. Accordingly, the vaccines and methods of the present invention are useful to modulate the immune response can be modulated, as appropriate, for the target disease. Similar engineering of the response is not possible with traditional approaches outside the scope of the present invention.

[0034] Another major benefit of epitope-based immune-stimulating vaccines of the present invention is their safety. The possible pathological side effects caused by infectious agents or whole protein antigens, which might have their own intrinsic biological activity, are eliminated.

[0035] Epitope-based vaccines of the present invention also provide the ability to direct and focus an immune response to multiple selected antigens from the same pathogen. Thus, in certain embodiments, patient-by-patient variability in the immune response to a particular pathogen may be alleviated by inclusion of epitopes from multiple antigens from the pathogen in a vaccine composition. In preferred embodiments of the present invention, epitopes derived from multiple strains of HPV may also be included. In a highly preferred embodiment of the present invention, epitopes derived from one or more of HPV strains 6a, 6b, 11a, 16, 18, 31, 33, 45, 52, 56, and 58 are included.

[0036] In a preferred embodiment, epitopes for inclusion in epitope compositions and/or vaccine compositions of the invention are selected by a process whereby protein sequences of known antigens are evaluated for the presence of motif or supermotif-bearing epitopes. Peptides corresponding to a motif- or supermotif-bearing epitope are then synthesized and tested for the ability to bind to the HLA molecule that recognizes the selected motif. Those peptides that bind at an intermediate or high affinity i.e., an IC₅₀ (or a KD value) of 500 nM or less for HLA class I molecules or an IC₅₀ of 1000 nM or less for HLA class II molecules, are further evaluated for their ability to induce a CTL or HTL response. Immunogenic peptide epitopes are selected for inclusion in epitope compositions and/or vaccine compositions.

[0037] In certain embodiments, supermotif-bearing peptides are tested for the ability to bind to multiple alleles within the HLA supertype family. In other related embodiments, peptide epitopes may be analoged to modify binding affinity and/or the ability to bind to multiple alleles within an HLA supertype.

[0038] The invention also includes embodiments comprising methods for monitoring or evaluating an immune response to HPV in a patient having a known HLA-type. Such methods comprise incubating a T lymphocyte sample from the patient with a peptide composition comprising an HPV epitope that has an amino acid sequence described in Tables 7-18 which binds the product of at least one HLA allele present in the patient, and detecting and/or measuring for the presence of a T lymphocyte that binds to the peptide. In certain embodiments, a CTL peptide epitope may, for example, be used as a component of a tetrameric complex for this type of analysis.

[0039] An alternative modality for defining the peptide epitopes in accordance with certain embodiments of the invention is to recite the physical properties, such as length; primary structure; or charge, which are correlated with binding to a particular allele-specific HLA molecule or group of allele-specific HLA molecules. A further modality of the invention for defining peptide epitopes is to recite the physical properties of an HLA binding pocket, or properties shared by several allele-specific HLA binding pockets (e.g. pocket configuration and charge distribution) and reciting that the peptide epitope fits and binds to the pocket or pockets.

[0040] Certain embodiments of the present invention are also directed to methods for selecting a variant of a peptide epitope which induces a CTL response against not only itself, but also against the peptide epitope itself and/or one or more other variants of the peptide epitope, by determining whether the variant comprises only conserved residues, as defined herein, at non-anchor positions in comparison to the other variant(s). Variants are referred to herein as “CTL epitopes” and “HTL epitopes” as well as “variants.”

[0041] In some embodiments, antigen sequences from a population of HPV (said antigens comprising variants of a peptide epitope) are optimally aligned (manually or by computer) along their length, preferably their full length. Variant(s) of a peptide epitope (preferably naturally occurring variants), each 8-11 amino acids in length and comprising the same MHC class I supermotif or motif, are identified manually or with the aid of a computer. In some embodiments, a variant is optimally chosen which comprises preferred anchor residues of said motif and/or which occurs with high frequency within the population of variants. In other embodiments, a variant is randomly chosen. The randomly or otherwise chosen variant is compared to from one to all the remaining variant(s) to determine whether it comprises only conserved residues in the non-anchor positions relative to from one to all the remaining variant(s).

[0042] The present invention is also directed to variants identified by the methods above; peptides comprising such variants; nucleic acids encoding such variants and peptides; cells comprising such variants, and/or peptides, and/or nucleic acids; compositions comprising such variants, and/or peptides, and/or nucleic acids, and/or cells; as well as prophylactic, therapeutic, and/or diagnostic methods for using such variants, peptides, nucleic acids, cells, and compositions.

[0043] The invention also provides multi-epitope nucleic acid constructs encoding a plurality of CTL and/or HTL epitopes (including variants in certain embodiments) and polypeptide constructs comprising a plurality of CTL and/or HTL epitopes (preferably encoded by the nucleic acid constructs), as well as cells comprising such nucleic acid constructs and/or polypeptide constructs, compositions comprising such nucleic acid constructs and/or polypeptide constructs and/or such cells, and methods for stimulating an immune response (e.g., therapeutic and/or prophylactic methods) utilizing such nucleic acid constructs and/or polypeptide constructs and/or compositions and/or cells.

[0044] In other embodiments, the invention provides cells comprising the nucleic acids and/or polypeptides above; compositions comprising the nucleic acids and/or polypeptides and/or cells; methods for making these nucleic acids, polypeptides, cells and compositions; and methods for stimulating an immune response (e.g. therapeutic and/or prophylactic methods) utilizing these nucleic acids and/or polypeptides and/or cells and/or compositions.

[0045] In other embodiments, the invention provides a polynucleotide selected from the following polynucleotides (a)-(m), each encoding the human papillomavirus (HPV) cytotoxic T lymphocyte (CTL) epitopes of Core Group HPV 64.

[0046] (a) A multi-epitope polynucleotide construct comprising nucleic acids encoding the human papillomavirus (HPV) cytotoxic T lymphocyte (CTL) epitopes of Core Group HPV 64. These epitopes are: HPV.31.E7.44.T2, HPV16.E6.106HPV16.E6.131, HPV16.E6.29.L2, HPV16.E6.68.R10, HPV16.E6.75.F9, HPV16.E6.80.D3, HPV16.E7.11.V10, HPV16.E7.2.T2, HPV16.E7.56.F10, HPV18.E6.126.F9, HPV18.E6.24, HPV18.E6.25.T2, HPV18.E6.33.F9, HPV18.E6.47, HPV18.E6.72.D3, HPV18.E6.83.R10, HPV18.E6.84.V10, HPV18.E6.89, HPV18.E7.59.R9, HPV18/45.E6.13, HPV18/45.E6.98.F9, HPV31.E6.15, HPV31.E6.46.T2, HPV31.E6.47, HPV31.E6.69, HPV31.E6.72, HPV31.E6.80, HPV31.E6.82.R9, HPV31.E6.83, HPV31.E6.90, HPV33.E6.42, HPV33.E6.53, HPV33.E6.61.V10, HPV33.E6.64, HPV33.E7.11.V10, HPV33.E7.6, HPV33.E7.81, HPV33/52.E6.68.V2, HPV33/58.E6.124.F9, HPV33/58.E6.72.R10, HPV33/58.E6.73.D3, HPV45.E6.24, HPV45.E6.25. T2, HPV45.E6.28, HPV45.E6.37, HPV45.E6.41.R10, HPV45.E6.44, HPV45.E6.71.F10, HPV45.E6.84.R9, HPV45.E7.20, HPV56.E6.25, HPV56.E6.45, HPV56.E6.55.K9, HPV56.E6.62.F10, HPV56.E6.70, HPV56.E6.72.T2, HPV56.E6.86, HPV56.E6.89, HPV56.E6.99.T2, HPV56.E7.84.V10, and HPV56.E7.92.L2, wherein the nucleic acids are directly or indirectly joined to one another in the same reading frame. Note that the nucleic acids encoding the epitopes listed above may be arranged in any order.

[0047] (b) A multi-epitope polynucleotide construct comprising nucleic acids encoding the human papillomavirus (HPV) cytotoxic T lymphocyte (CTL) epitopes of Core Group HPV 64 (hereinafter “the HPV 64 core construct”), and also encoding one or more additional CTL and/or HTL epitopes.

[0048] (c) The HPV 64 core construct as in (a) or (b), where the nucleic acids encoding the epitopes listed above are arranged in a specified order, but may have additional nucleic acids encoding additional epitopes and/or spacer amino acids dispersed therein.

[0049] (d) The HPV 64 core construct as in (a)-(c), where one or more epitope-encoding nucleic acids are flanked by spacer nucleotides, and/or other polynucleotide sequences as described herein or otherwise known in the art. Such spacer nucleotides encode one or more spacer amino acids so as to keep the multi-epitope construct in frame.

[0050] (e) The HPV 64 core construct as in (a)-(d), where the multi-epitopeconstruct is distinguished from other multi-epitopeconstructs according to whether the spacer nucleotides in one construct encode spacer amino acids which optimize epitope processing and/or minimize junctional epitopes with respect to other constructs as described herein or elsewhere.

[0051] (f) The HPV 64 core construct as in (a)-(e), where the multi-epitope construct encodes a polypeptide which is concomitantly optimized for epitope processing and junctional epitopes with respect to one or more other constructs as described herein.

[0052] (g) The HPV 64 core construct as in (a)-(f), where the multi-epitope-construct further comprises a PADRE HTL epitope, as described herein.

[0053] (h) The HPV 64 core construct as in (a)-(g), further comprising nucleic acids encoding HPV CTL epitopes HPV16.E6.30.T2 and HPV16.E6.59.

[0054] (i) The HPV 64 core construct as in (a)-(h), further comprising nucleic acids encoding HPV CTL epitopes HPV16.E6.75.L2 and HPV16.E6.77.

[0055] (j) The HPV 64 core construct as in (h), comprising or alternatively consisting of the multi-epitope construct HPV 64 gene 1 (See Tables 38A, 39A and 40A).

[0056] (k) The HPV 64 core construct as in (h), comprising or alternatively consisting of the multi-epitope construct HPV 64 gene 2 (See Tables 38B, 39B and 40B).

[0057] (l) The HPV 64 core construct as in (i), comprising or alternatively consisting of the multi-epitope construct HPV 64 gene 1R (See Tables 41A, 42A and 43A).

[0058] (m) The HPV 64 core construct as in (i), comprising or alternatively consisting of the multi-epitope construct HPV 64 gene 2R (See Tables 41B, 42B and 43B).

[0059] In other embodiments, the invention provides a polypeptide comprising HPV 64 CTL epitopes encoded by any of polynucleotides (a)-(m) listed above.

[0060] In other embodiments, the invention provides a polynucleotide selected from the following polynucleotides (a)-(m), each encoding the human papillomavirus (HPV) cytotoxic T lymphocyte (CTL) epitopes of Core Group HPV 43.

[0061] (a) A multi-epitope polynucleotide construct comprising nucleic acids encoding the human papillomavirus (HPV) cytotoxic T lymphocyte (CTL) epitopes of Core Group HPV 43. These epitopes are: HPV.31.E7.44.T2, HPV16.E6.106, HPV16.E6.131, HPV16.E6.29.L2, HPV16.E6.30.T2, HPV16.E6.75.F9, HPV16.E6.80.D3, HPV16.E7.11.V10, HPV16.E7.2.T2, HPV16.E7.56.F10, HPV18.E6.126.F9, HPV18.E6.24, HPV18.E6.25.T2, HPV18.E6.33.F9, HPV18.E6.47, HPV18.E6.72.D3, HPV18.E6.83.R10, HPV18.E6.84.V10, HPV18.E6.89, HPV18.E7.59.R9, HPV18/45.E6.13, HPV18/45.E6.98.F9, HPV31.E6.15, HPV31.E6.46.T2, HPV31.E6.47, HPV31.E6.69, HPV31.E6.80, HPV31.E6.82.R9, HPV31.E6.83, HPV31.E6.90, HPV33.E7.11.V10, HPV45.E6.24, HPV45.E6.25.T2, HPV45.E6.28, HPV45.E6.37, HPV45.E6.41.R10, HPV45.E6.44, HPV45.E6.71.F10, HPV45.E6.84.R9, and HPV45.E7.20, where the nucleic acids are directly or indirectly joined to one another in the same reading frame. Note that the nucleic acids encoding the epitopes listed above may be arranged in any order.

[0062] (b) A multi-epitope polynucleotide construct comprising nucleic acids encoding the human papillomavirus (HPV) cytotoxic T lymphocyte (CTL) epitopes of Core Group HPV 43 (hereinafter “the HPV 43 core construct”), and also encoding one or more additional CTL and/or HTL epitopes.

[0063] (c) The HPV 43 core construct as in (a)-(b), where the nucleic acids encoding the epitopes listed above are arranged in a specified order, but may have additional nucleic acids encoding additional epitopes and/or spacer amino acids dispersed therein.

[0064] (d) The HPV 43 core construct as in (a)-(c), where one or more epitope-encoding nucleic acids are flanked by spacer nucleotides, and/or other polynucleotide sequences as described herein or otherwise known in the art. Such spacer nucleotides encode one or more spacer amino acids so as to keep the multi-epitope construct in frame.

[0065] (e) The HPV 43 core construct as in (a)-(d), where the multi-epitopeconstruct is distinguished from other multi-epitopeconstructs according to whether the spacer nucleotides in one construct encode spacer amino acids which optimize epitope processing and/or minimize junctional epitopes with respect to other constructs as described herein or elsewhere.

[0066] (f) The HPV 43 core construct as in (a)-(e), where the multi-epitope construct encodes a polypeptide which is concomitantly optimized for epitope processing and junctional epitopes with respect to one or more other constructs as described herein.

[0067] (g) The HPV 43 core construct as in (a)-(f), where the multi-epitope-construct further comprises a PADRE HTL epitope, as described herein.

[0068] (h) The HPV 43 core construct as in (a)-(g), further comprising nucleic acids encoding HPV CTL epitopes HPV31.E6.72, HPV16.E6.59, and HPV16.E6.68.R10.

[0069] (i) The HPV 43 core construct as in (a)-(g), further comprising nucleic acids encoding HPV CTL epitopes HPV16.E6.75.L2, HPV16.E6.77, and HPV31.E6.73.D3.

[0070] (j) The HPV 43 core construct as in (h), comprising or alternatively consisting of the multi-epitope construct HPV 43 gene 3 (See Tables 38C, 39C and 40C).

[0071] (k) The HPV 43 core construct as in (h), comprising or alternatively consisting of the multi-epitope construct HPV 43 gene 4 (See Tables 38D, 39D and 40D).

[0072] (l) The HPV 43 core construct as in (i), comprising or alternatively consisting of the multi-epitope construct HPV 43 gene 3R (See Tables 41C, 42C and 43C).

[0073] (m) The HPV 43 core construct as in (i), comprising or alternatively consisting of the multi-epitope construct HPV 43 gene 4R (See Tables 41D, 42D and 43D).

[0074] In other embodiments, the invention provides a polypeptide comprising HPV 43 CTL epitopes encoded by any of polynucleotides (a)-(m) listed above.

[0075] In other embodiments, the invention provides a polynucleotide selected from the following polynucleotides (a)-(m), each encoding the human papillomavirus (HPV) cytotoxic T lymphocyte (CTL) epitopes of Core Group HPV 46.

[0076] (a) A multi-epitope polynucleotide construct comprising nucleic acids encoding the human papillomavirus (HPV) cytotoxic T lymphocyte (CTL) epitopes of Core Group HPV 46. These epitopes are: HPV16.E6.106, HPV16.E6.29.L2, HPV16.E6.68.R10, HPV16.E6.75.F9, HPV16.E6.75.L2, HPV16.E6.77, HPV16.E6.80.D3, HPV16.E7.11.V10, HPV16.E7.2.T2, HPV16.E7.56.F10, HPV16.E7.86.V8, HPV18.E6.24, HPV18.E6.25.T2, HPV18.E6.33.F9, HPV18.E6.53.K10, HPV18.E6.72.D3, HPV18.E6.83.R10, HPV18.E6.84.V10, HPV18.E6.92.V10, HPV18.E7.59.R9, HPV18/45.E6.13, HPV18/45.E6.98.F9, HPV31.E6.132.K10, HPV31.E6.15, HPV31.E6.72, HPV31.E6.73.D3, HPV31.E6.80, HPV31.E6.82.R9, HPV31.E6.83.F9, HPV31.E6.90, HPV.31.E7.44.T2, HPV33.E7.11.V10, HPV45.E6.24, HPV45.E6.25.T2, HPV45.E6.37, HPV45.E6.41.R10, HPV45.E6.44, HPV45.E6.54, HPV45.E6.54.V10, HPV45.E6.71.F10, HPV45.E6.84.R9, and HPV45.E7.20, where the nucleic acids are directly or indirectly joined to one another in the same reading frame. Note that the nucleic acids encoding the epitopes listed above may be arranged in any order.

[0077] (b) A multi-epitope polynucleotide construct comprising nucleic acids encoding the human papillomavirus (HPV) cytotoxic T lymphocyte (CTL) epitopes of Core Group HPV 46 (hereinafter “the HPV 46 core construct”), and also encoding one or more additional CTL and/or HTL epitopes.

[0078] (c) The HPV 46 core construct as in (a)-(b), where the nucleic acids encoding the epitopes listed above are arranged in a specified order, but may have additional nucleic acids encoding additional epitopes and/or spacer amino acids dispersed therein.

[0079] (d) The HPV 46 core construct as in (a)-(c), where one or more epitope-encoding nucleic acids are flanked by spacer nucleotides, and/or other polynucleotide sequences as described herein or otherwise known in the art. Such spacer nucleotides encode one or more spacer amino acids so as to keep the multi-epitope construct in frame.

[0080] (e) The HPV 46 core construct as in (a)-(d), where the multi-epitopeconstruct is distinguished from other multi-epitopeconstructs according to whether the spacer nucleotides in one construct encode spacer amino acids which optimize epitope processing and/or minimize junctional epitopes with respect to other constructs as described herein or elsewhere.

[0081] (f) The HPV 46 core construct as in (a)-(e), where the multi-epitope construct encodes a polypeptide which is concomitantly optimized for epitope processing and junctional epitopes with respect to one or more other constructs as described herein.

[0082] (g) The HPV 46 core construct as in (a)-(f), where the multi-epitope-construct further comprises a PADRE HTL epitope, as described herein.

[0083] (h) The HPV 46 core construct as in (a)-(g), further comprising nucleic acids encoding HPV CTL epitopes HPV31.E6.69, HPV16.E6.131, HPV18.E6.126.F9, and HPV18.E6.89.

[0084] (i) The HPV 46 core construct as in (a)-(h), further comprising nucleic acids encoding HPV CTL epitopes HPV31.E6.69, HPV16.E6.131, HPV18.E6.126.F9 and HPV18.E6.89.I2.

[0085] (j) The HPV 46 core construct as in (a)-(i), further comprising nucleic acids encoding HPV CTL epitopes HPV18.E6.89, HPV16.E7.2.T2, HPV18.E6.44, and HPV31.E6.69+R@68.

[0086] (k) The HPV 46 core construct as in (h), comprising or alternatively consisting of the multi-epitope construct HPV 46-5 (See Tables 47A and 49A).

[0087] (l) The HPV 46 core construct as in (h), comprising or alternatively consisting of the multi-epitope construct HPV 46-5.2 (See Tables 47C, 49C).

[0088] (m) The HPV 46 core construct as in (i), comprising or alternatively consisting of the multi-epitope construct HPV 46-6 (See Tables 47B, 49B).

[0089] (n) The HPV 46 core construct as in (j), comprising or alternatively consisting of the multi-epitope construct HPV 46-5.3 (See Table 73).

[0090] In other embodiments, the invention provides a polypeptide comprising HPV 46 CTL epitopes encoded by any of polynucleotides (a)-(n) listed above.

[0091] In other embodiments, the invention provides a polynucleotide selected from the following polynucleotides (a)-(m), each encoding the human papillomavirus (HPV) cytotoxic T lymphocyte (CTL) epitopes of Core Group HPV 47.

[0092] (a) A multi-epitope polynucleotide construct comprising nucleic acids encoding the human papillomavirus (HPV) cytotoxic T lymphocyte (CTL) epitopes of Core Group HPV 47. These epitopes are: HPV16.E1.214, HPV16.E1.254, HPV16.E1.314, HPV16.E1.420, HPV16.E1.585, HPV16.E2.130, HPV16.E2.329, HPV16/52.E2.151, HPV18.E1.592, HPV18.E2.136, HPV18.E2.142, HPV18.E2.15, HPV18.E2.154, HPV18.E2.168, HPV18.E2.230, HPV18/45.E1.321, HPV18/45.E1.491, HPV31.E1.272, HPV31.E1.349, HPV31.E1.565, HPV31.E2.11, HPV31.E2.130, HPV31.E2.138, HPV31.E2.205, HPV31.E2.291, HPV31.E2.78, HPV45.E1.232, HPV45.E1.252, HPV45.E1.399, HPV45.E1.411, HPV45.E1.578, HPV45.E2.137, HPV45.E2.144, HPV45.E2.17, HPV45.E2.332, and HPV45.E2.338, wherein the nucleic acids are directly or indirectly joined to one another in the same reading frame. Note that the nucleic acids encoding the epitopes listed above may be arranged in any order.

[0093] (b) A multi-epitope polynucleotide construct comprising nucleic acids encoding the human papillomavirus (HPV) cytotoxic T lymphocyte (CTL) epitopes of Core Group HPV 47 (hereinafter “the HPV 47 core construct”), and also encoding one or more additional CTL and/or HTL epitopes.

[0094] (c) The HPV 47 core construct as in (a)-(b), where the nucleic acids encoding the epitopes listed above are arranged in a specified order, but may have additional nucleic acids encoding additional epitopes and/or spacer amino acids dispersed therein.

[0095] (d) The HPV 47 core construct as in (a)-(c), where one or more epitope-encoding nucleic acids are flanked by spacer nucleotides, and/or other polynucleotide sequences as described herein or otherwise known in the art. Such spacer nucleotides encode one or more spacer amino acids so as to keep the multi-epitope construct in frame.

[0096] (e) The HPV 47 core construct as in (a)-(d), where the multi-epitopeconstruct is distinguished from other multi-epitopeconstructs according to whether the spacer nucleotides in one construct encode spacer amino acids which optimize epitope processing and/or minimize junctional epitopes with respect to other constructs as described herein or elsewhere.

[0097] (f) The HPV 47 core construct as in (a)-(e), where the multi-epitope construct encodes a polypeptide which is concomitantly optimized for epitope processing and junctional epitopes with respect to one or more other constructs as described herein.

[0098] (g) The HPV 47 core construct as in (a)-(f), where the multi-epitope-construct further comprises a PADRE HTL epitope, as described herein.

[0099] (h) The HPV 47 core construct as in (a)-(g), further comprising nucleic acids encoding HPV CTL epitopes HPV16.E1.493, HPV31/52.E1.557, HPV31.E2.131, HPV31.E2.127, HPV16.E2.335, HPV16.E2.37, HPV16.E2.93, HPV18.E2.211, HPV18.E2.61, HPV18.E1.266 and HPV18.E1.500.

[0100] (i) The HPV 47 core construct as in (a)-(h), further comprising nucleic acids encoding HPV CTL epitopes HPV16.E1.191, HPV16.E1.292, HPV16.E1.489, HPV16.E1.489, HPV6/52.E1.406, HPV18.E1.210, HPV18.E1.266, HPV18.E1.463, HPV31.E1.464, HPV18/45.E1.284 and HPV31.E1.441.

[0101] (j) The HPV 47 core construct as in (h), comprising or alternatively consisting of the multi-epitope construct 47-1 (See Tables 52A, 53A and 54A).

[0102] (k) The HPV 47 core construct as in (h), comprising or alternatively consisting of the multi-epitope construct 47-2 (See Tables 52B, 53B and 54B).

[0103] (l) The HPV 47 core construct as in (i), comprising or alternatively consisting of the multi-epitope construct 47-3 (See Tables 74, 76A and 76B).

[0104] (m) The HPV 47 core construct as in (i), comprising or alternatively consisting of the multi-epitope construct 47-4 (See Tables 75, 76C and 76D).

[0105] In other embodiments, the invention provides a polypeptide comprising HPV 46 CTL epitopes encoded by any of polynucleotides (a)-(m) listed above.

[0106] In other embodiments, the invention provides a polynucleotide selected from the following polynucleotides (a)-(p), each encoding the human papillomavirus (HPV) helper T lymphocyte (HTL) epitopes of Core Group HTL780-20/30.

[0107] (a) A multi-epitope polynucleotide construct comprising nucleic acids encoding the human papillomavirus (HPV) helper T lymphocyte (HTL) epitopes of Core Group HTL780-20/30. These epitopes are: HPV16.E6.13, HPV16.E6.130, HPV16.E7.13, HPV16.E7.46, HPV16.E7.76, HPV18.E6.43, HPV31.E6.132, HPV31.E6.42, HPV31.E6.78, HPV45.E6.127, HPV45.E7.10 and HPV45.E7.82, wherein the nucleic acids are directly or indirectly joined to one another in the same reading frame. Note that the nucleic acids encoding the epitopes listed above may be arranged in any order.

[0108] (b) A multi-epitope polynucleotide construct comprising nucleic acids encoding the human papillomavirus (HPV) cytotoxic T lymphocyte (CTL) epitopes of Core Group HTL780-20/30 (hereinafter “the HTL780-20/30 core construct”), and also encoding one or more additional CTL and/or HTL epitopes.

[0109] (c) The HTL780-20/30 core construct as in (a)-(b), where the nucleic acids encoding the epitopes listed above are arranged in a specified order, but may have additional nucleic acids encoding additional epitopes and/or spacer amino acids dispersed therein.

[0110] (d) The HTL780-20/30 core construct as in (a)-(c), where one or more epitope-encoding nucleic acids are flanked by spacer nucleotides, and/or other polynucleotide sequences as described herein or otherwise known in the art. Such spacer nucleotides encode one or more spacer amino acids so as to keep the multi-epitope construct in frame.

[0111] (e) The HTL780-20/30 core construct as in (a)-(d), where the multi-epitopeconstruct is distinguished from other multi-epitopeconstructs according to whether the spacer nucleotides in one construct encode spacer amino acids which optimize epitope processing and/or minimize junctional epitopes with respect to other constructs as described herein or elsewhere.

[0112] (f) The HTL780-20/30 core construct as in (a)-(e), where the multi-epitope construct encodes a polypeptide which is concomitantly optimized for epitope processing and junctional epitopes with respect to one or more other constructs as described herein.

[0113] (g) The HTL780-20/30 core construct as in (a)-(f), where the multi-epitope-construct further comprises a PADRE HTL epitope, as described herein.

[0114] (h) The HTL780-20/30 core construct as in (a)-(g), further comprising nucleic acids encoding HPV HTL epitopes HPV18.E6.52 and 53, HPV18.E6.94+Q, HPV18.E7.86 and HPV31.E7.76.

[0115] (i) The HTL780-20/30 core construct as in (a)-(h), further comprising nucleic acids encoding HPV HTL epitopes HPV18.E6.94, HPV18.E7.78, HPV31.E6.1 and HPV31.E7.36.

[0116] (j) The HTL780-20/30 core construct as in (h), comprising or alternatively consisting of the multi-epitope construct HTL 780-30 (See Tables 80 and 81).

[0117] (k) The HTL780-20/30 core construct as in (i), comprising or alternatively consisting of the multi-epitope construct HTL 780-20.

[0118] (l) The HTL780-20/30 core construct as in (a)-(k), further comprising any of the HPV 46 core constructs (a)-(m) as described above.

[0119] (m) The HTL780-20/30 core construct as in (a)-(1), further comprising nucleic acids encoding HPV CTL epitopes CTL epitopes HPV31.E6.69, HPV16.E6.131, HPV18.E6.126.F9, and HPV18.E6.89.

[0120] (n) The HTL780-20/30 core construct as in (a)-(m), further comprising nucleic acids encoding HPV CTL epitopes HPV18.E6.89, HPV16.E7.2.T2, HPV18.E6.44, and HPV31.E6.69+R@68.

[0121] (o) The HTL780-20/30 core construct as in (n), comprising or alternatively consisting of the multi-epitope construct HPV46-5.3/HTL780-20 (See Tables 71, 72 A and 72B).

[0122] (p) The HTL780-20/30 core construct as in (n), comprising or alternatively consisting of the multi-epitope construct HPV46-5.2/HTL780-20 (See Tables 70, 72E and 72F).

[0123] Further, certain embodiments comprising novel synthetic peptides produced by any of the methods described herein are also part of the invention. As will be apparent from the discussion below, certain embodiments comprising other methods and compositions are also contemplated as part of the present invention.

[0124] In some embodiments, the invention provides a polynucleotide comprising or alternatively consisting of:

[0125] (a) a multi-epitope construct comprising nucleic acids encoding the human papillomavirus (HPV) cytotoxic T lymphocyte (CTL) epitopes HPV16.E1.214, HPV16.E1.254, HPV16.E1.314, HPV16.E1.420, HPV16.E1.585, HPV16.E2.130, HPV16.E2.329, HPV16/52.E2.151, HPV18.E1.592, HPV18.E2.136, HPV18.E2.142, HPV18.E2.15, HPV18.E2.154, HPV18.E2.168, HPV18.E2.230, HPV18/45.E1.321, HPV18/45.E1.491, HPV31.E1.272, HPV31.E1.349, HPV31.E1.565, HPV31.E2.11, HPV31.E2.130, HPV31.E2.138, HPV31.E2.205, HPV31.E2.291, HPV31.E2.78, HPV45.E1.232, HPV45.E1.252, HPV45.E1.399, HPV45.E1.411, HPV45.E1.578, HPV45.E2.137, HPV45.E2.144, HPV45.E2.17, HPV45.E2.332, and HPV45.E2.338, wherein the nucleic acids are directly or indirectly joined to one another in the same reading frame;

[0126] (b) the multi-epitope construct of (a), further comprising nucleic acids encoding the human papillomavirus (HPV) cytotoxic T lymphocyte (CTL) epitopes HPV16.E1.493, HPV31/52.E1.557, HPV31.E2.131, HPV31.E2.127, HPV16.E2.335, HPV16.E2.37, HPV16.E2.93, HPV18.E2.211, HPV18.E2.61, HPV18.E1.266, and HPV18.E1.500, directly or indirectly joined in the same reading frame to said CTL epitope nucleic acids of (a);

[0127] (c) the multi-epitope construct of (a), further comprising nucleic acids encoding the human papillomavirus (HPV) cytotoxic T lymphocyte (CTL) epitopes HPV16.E1.1191, HPV16.E1.292, HPV16.E1.489, HPV16.E1.489, HPV16/52.E1.406, HPV18.E1.210, HPV18.E1.266, HPV18.E1.463, HPV31.E1.464, HPV18/45.E1.284, and HPV31.E1.441 directly or indirectly joined in the same reading frame to said CTL epitope nucleic acids of (a);

[0128] (d) the multi-epitope construct of (a), further comprising nucleic acids encoding the human papillomavirus (HPV) cytotoxic T lymphocyte (CTL) epitopes HPV16.E1.191, HPV16.E1.292, HPV16.E1.489, HPV16.E1.489, HPV16/52.E1.406, HPV18.E1.210, HPV18.E1.266, HPV18.E1.463, HPV31.E1.464, HPV18/45.E1.284, and HPV31.E1.441 directly or indirectly joined in the same reading frame to said CTL epitope nucleic acids of (a);

[0129] (e) a multi-epitope construct comprising nucleic acids encoding the human papillomavirus (HPV) cytotoxic T lymphocyte (CTL) epitopes HPV16.E6.106, HPV16.E6.29.L2, HPV16.E6.68.R10, HPV16.E6.75.F9, HPV16.E6.75.L2, HPV16.E6.77, HPV16.E6.80.D3, HPV16.E7.11.V10, HPV16.E7.2.T2, HPV16.E7.56.F10, HPV16.E7.86.V8, HPV18.E6.24, HPV18.E6.25.T2, HPV18.E6.53.K10, HPV18.E6.72.D3, HPV18.E6.83. R10, HPV18.E6.84.V10, HPV18.E6.89, HPV18.E6.92.V10, HPV18.E7.59. R9, HPV18/45.E6.13, HPV18/45.E6.98.F9, HPV31.E6.132.K10, HPV31.E6.15, HPV31.E6.72, HPV31.E6.73 D3, HPV31.E6.80, HPV31.E6.82R9, HPV31.E6.83, HPV31.E6.90, HPV31.E7.44.T2, HPV33.E7.11 V10, HPV45.E6.24, HPV45.E6.25 T2, HPV45.E6.37, HPV45.E6.41.R10, HPV45.E6.44, HPV45.E6.54, HPV45.E6.54.V10, HPV45.E6.71.F10, HPV45.E6.84.R9 and HPV45.E7.20, wherein the nucleic acids are directly or indirectly joined to one another in the same reading frame;

[0130] (f) the multi-epitope construct of (e), further comprising nucleic acids encoding the human papillomavirus (HPV) cytotoxic T lymphocyte (CTL) epitopes HPV16.E6.131, HPV18.E6.126.F9, HPV31.E6.69, HPV18.E6.33.F9, directly or indirectly joined in the same reading frame to said CTL epitope nucleic acids of (d);

[0131] (g) the the multi-epitope construct of (e), further comprising nucleic acids encoding the human papillomavirus (HPV) cytotoxic T lymphocyte (CTL) epitopes HPV18.E6.33, HPV16.E6.87, HPV18.E6.44, HPV31.E6.69+R@68, directly or indirectly joined in the same reading frame to said CTL epitope nucleic acids of (d);

[0132] (h) the multi-epitope construct of (a) or (b) or (c) or (d) or (e) or (f) or (g), further comprising one or more spacer nucleic acids encoding one or more spacer amino acids, directly or indirectly joined in the same reading frame to said CTL epitope nucleic acids;

[0133] (i) the multi-epitope construct of (h), wherein said one or more spacer nucleic acids are positioned between the CTL epitope nucleic acids of (a), between the CTL epitope nucleic acids of (b), between the CTL epitope nucleic acids of (c), between the CTL epitope nucleic acids of (d), between the CTL epitope nucleic acids of (a) and (b), between the CTL epitope nucleic acids of (a) and (c), between the CTL epitope nucleic acids of (a) and (d), between the CTL epitope nucleic acids of (e), between the CTL epitope nucleic acids of (f), between the CTL epitope nucleic acids of (g), between the CTL epitope nucleic acids of (e) and (f), or between the CTL epitope nucleic acids of (e) and (g);

[0134] (j) the multi-epitope construct of (h) or (i), wherein said one or more spacer nucleic acids each encode 1 to 8 amino acids;

[0135] (k) the multi-epitope construct of any of (h) to (O), wherein two or more of said spacer nucleic acids encode different (i.e., non-identical) amino acid sequences;

[0136] (l) the multi-epitope construct of any of (h) to (k), wherein two or more of said spacer nucleic acids encode an amino acid sequence different from an amino acid sequence encoded by one or more other spacer nucleic acids;

[0137] (m) the multi-epitope construct of any of (h) to (l), wherein two or more of the spacer nucleic acids encodes the identical amino acid sequence;

[0138] (n) the multi-epitope construct of any of (h) to (m), wherein one or more of said spacer nucleic acids encode an amino acid sequence comprising or consisting of three consecutive alanine (Ala) residues;

[0139] (o) the multi-epitope construct of any of (a) to (n), further comprising one or more nucleic acids encoding one or more HTL epitopes, directly or indirectly joined in the same reading frame to said CTL epitope nucleic acids and/or said spacer nucleic acids;

[0140] (p) the multi-epitope construct of (o), wherein said one or more HTL epitopes comprises a PADRE epitope;

[0141] (q) the multi-epitope construct of (o) or (p), wherein said one or more HTL epitopes comprise one or more HPV HTL epitopes;

[0142] (r) the multi-epitope construct of (q), wherein said one or more HPV HTL epitopes comprise HPV16.E1.319,HPV16.E1.337, HPV18.E1.258, HPV18.E1.458, HPV18.E2.140, HPV31.E1.015, HPV31.E1.317, HPV31.E2.67, HPV45.E1.484, HPV45.E1.510, and HPV45.E2.352;

[0143] (s) the multi-epitope construct of (r), wherein said one or more HPV HTL epitopes further comprise HPV16.E2.156, HPV16.E2.7, HPV18.E2.277, HPV31.E2.354, and HPV45.E2.67;

[0144] (t) the multi-epitope construct of (r), wherein said one or more HPV HTL epitopes further comprise HPV16.E2.160, HPV16.E2.19, HPV18.E2.127, HPV18.E2.340, and HPV31.E2.202;

[0145] (u) the multi-epitope construct of (q), wherein said one or more HPV HTL epitopes comprise HPV16.E6.13, HPV16.E6.130, HPV16.E7.13, HPV16.E7.46, HPV16.E7.76, HPV18.E6.43, HPV31.E6.132, HPV31.E6.42, HPV31.E6.78, HPV45.E6.127, and HPV45.E7.10;

[0146] (v) the multi-epitope construct of (u), wherein said one or more HPV HTL epitopes further comprise HPV18.E6.94, HPV18.E7.78, HPV31.E6.1, HPV31.E7.36, and HPV45.E7.82;

[0147] (w) the multi-epitope construct of (u), wherein said one or more HPV HTL epitopes further comprise HPV18.E6.52 and 53, HPV18.E6.94+Q, HPV18.E7.86, HPV31.E7.76, and HPV45.E6.52;

[0148] (x) the multi-epitope construct of any of (o) to (w), further comprising one or more spacer nucleic acids encoding one or more spacer amino acids directly or indirectly joined in the same reading frame between a CTL epitope and an HTL epitope or between HTL epitopes;

[0149] (y) the multi-epitope construct of (x), wherein said spacer nucleic acid encodes an amino acid sequence selected from the group consisting of: an amino acid sequence comprising or consisting of GPGPG (SEQ ID NO:______), an amino acid sequence comprising or consisting of PGPGP (SEQ ID NO:______), an amino acid sequence comprising or consisting of (GP)n, an amino acid sequence comprising or consisting of (PG)n, an amino acid sequence comprising or consisting of (GP)nG, and an amino acid sequence comprising or consisting of (PG)nP, where n is an integer between zero and eleven;

[0150] (z) the multi-epitope construct of any of (a) to (y), further comprising one or more MHC Class I and/or MHC Class II targeting nucleic acids;

[0151] (aa) the multi-epitope construct of (z), wherein said one or more targeting nucleic acids encode one or more targeting sequences selected from the group consisting of: an Ig kappa signal sequence, a tissue plasminogen activator signal sequence, an insulin signal sequence, an endoplasmic reticulum signal sequence, a LAMP-1 lysosomal targeting sequence, a LAMP-2 Tysosomal targeting sequence, an HLA-DM lysosomal targeting sequence, an HLA-DM-association sequence of HLA-DO, an Ig-a cytoplasmic domain, Ig-ss cytoplasmic domain, a ii protein, an influenza matrix protein, an HCV antigen, and a yeast Ty protein;

[0152] (bb) the multi-epitope construct of any of (a) to (aa), which is optimized for CTL and/or HTL epitope processing;

[0153] (cc) the multi-epitope construct of any of (a) to (bb), wherein said CTL nucleic acids are sorted to minimize the number of CTL and/or HTL junctional epitopes encoded therein;

[0154] (dd) the multi-epitope construct of any of (q) to (cc), wherein said HTL nucleic acids are sorted to minimize the number of CTL and/or HTL junctional epitopes encoded therein;

[0155] (ee) the multi-epitope construct of any of (a) to (dd) further comprising one or more nucleic acids encoding one or more flanking amino acid residues;

[0156] (ff) the multi-epitope construct of (ee), wherein said one or more flanking amino acid residues are selected from the group consisting of: K, R, N, Q, G, A, S, C, and T at a C+1 position of one of said CTL epitopes;

[0157] (gg) the multi-epitope construct of any of (e), (f), (h)-(n), (z)-(cc), (ee) or (ff), wherein said HPV CTL epitopes are directly or indirectly joined in the order shown in Table 47C;

[0158] (hh) the multi-epitope construct of any of (e), (g), (h)-(n), (z)-(cc), (ee) or (ff), wherein the HPV CTL epitopes are directly or indirectly joined in the order shown in Table 85;

[0159] (ii) the multi-epitope construct of any of (a), (b), (h)-(n), (z)-(cc), (ee) or (ff), wherein the HPV CTL epitopes are directly or indirectly joined in the order shown in Table 52A;

[0160] (jj) the multi-epitope construct of any of (a), (b), (h)-(n), (z)-(cc), (ee) or (ff), wherein the HPV CTL epitopes are directly or indirectly joined in the order shown in Table 52B;

[0161] (kk) the multi-epitope construct of any of (a), (c), (h)-(n), (z)-(cc), (ee) or (ff), wherein the HPV CTL epitopes are directly or indirectly joined in the order shown in Table 74;

[0162] (ll) the multi-epitope construct of any of (a), (c), (h)-(n), (z)-(cc), (ee) or (ff), wherein the HPV CTL epitopes are directly or indirectly joined in the order shown in Table 75;

[0163] (mm) the multi-epitope construct of any of (a), (d), (h)-(n), (z)-(cc), (ee) or (ff), wherein the HPV CTL epitopes are directly or indirectly joined in the order shown in Table 83;

[0164] (nn) the multi-epitope construct of any of (r), (t), (x)-(bb), (dd) or (ff), wherein the HPV HTL epitopes are directly or indirectly joined in the order shown in Table 58A;

[0165] (oo) the multi-epitope construct of any of (r), (t), (x)-(bb), (dd) or (ff), wherein the HPV HTL epitopes are directly or indirectly joined in the order shown in Table 58B;

[0166] (pp) the multi-epitope construct of any of (u), (v), (x)-(bb), (dd) or (ff), wherein the HPV HTL epitopes are directly or indirectly joined in the order of the HTL epitopes shown in Table 70;

[0167] (qq) the multi-epitope construct of any of (u), (w), (x)-(bb), (dd) or (ff), wherein the HPV HTL epitopes are directly or indirectly joined in the order shown in Table 80;

[0168] (rr) the multi-epitope construct of any of (e), (f), (h)-(n), (r), (s), or (x)-(ff), wherein the HPV HTL epitopes are directly or indirectly joined in the order shown in Table 78;

[0169] (ss) the multi-epitope construct of (e), (f), (h)-(n), (u), (v), or (x)-(ff), wherein said HPV CTL epitopes and said HPV HTL epitopes are directly or indirectly joined in the order shown in Table 70;

[0170] (tt) the multi-epitope construct of (e), (g), (h)-(n), (u), (v), or (x)-(ff), wherein said HPV CTL epitopes and said HPV HTL epitopes are directly or indirectly joined in the order shown in Table 71;

[0171] (uu) the multi-epitope construct of (a), (b), (h)-(n), (r), (t), or (x)-(ff), wherein said HPV CTL epitopes and said HPV HTL epitopes are directly or indirectly joined in the order shown in Table 63A;

[0172] (vv) the multi-epitope construct of (a), (b), (h)-(n), (r), (t), or (x)-(ff), wherein said HPV CTL epitopes and said HPV HTL epitopes are directly or indirectly joined in the order shown in Table 63C;

[0173] (ww) the multi-epitope construct of (a), (b), (h)-(n), (r), (t), or (x)-(ff), wherein said HPV CTL epitopes and said HPV HTL epitopes are directly or indirectly joined in the order shown in Table 63B;

[0174] (xx) the multi-epitope construct of (a), (b), (h)-(n), (r), (t), or (x)-(ff), wherein said HPV CTL epitopes and said HPV HTL epitopes are directly or indirectly joined in the order shown in Table 63D;

[0175] (yy) the multi-epitope construct of (a), (c), (h)-(n), (r), (s), or (x)-(ff), wherein said HPV CTL epitopes and said HPV HTL epitopes are directly or indirectly joined in the order shown in Table 84;

[0176] (zz) the multi-epitope construct of any of (a) to (ff), wherein said construct encodes a polypeptide comprising or consisting of an amino acid sequence selected from the group consisting of: the amino acid sequence shown in Table 50C, the amino acid sequence shown in Table 54A, the amino acid sequence shown in Table 54B, the amino acid sequence shown in Table 59, the amino acid sequence shown in Table 61, the amino acid sequence shown in Table 65A, the amino acid sequence shown in Table 65B, the amino acid sequence shown in Table 65C, the amino acid sequence shown in Table 65D, the amino acid sequence shown in Table 69, the amino acid sequence shown in Table 72A, the amino acid sequence shown in Table 72E, the amino acid sequence shown in Table 73A, the amino acid sequence shown in Table 76A, the amino acid sequence shown in Table 76C, the amino acid sequence shown in Table 79A, the amino acid sequence shown in Table 79B, the amino acid sequence shown in Table 81, and a combination of two or more of said amino acid sequences; and

[0177] (aaa) the multi-epitope construct of any of (a) to (ff), wherein said construct comprises a nucleic acid sequence selected from the group consisting of: the nucleotide sequence in Table 49C, the nucleotide sequence in Table 53A, the nucleotide sequence in Table 53B, the nucleotide sequence in Table 59, the nucleotide sequence in Table 61, the nucleotide sequence in Table 64A, the nucleotide sequence in Table 64B, the nucleotide sequence in Table 64C, the nucleotide sequence in Table 64D, the nucleotide sequence in Table 72B, the nucleotide sequence in Table 72F, the nucleotide sequence in Table 73B, the nucleotide sequence in Table 76B, the nucleotide sequence in Table 76D, the nucleotide sequence in Table 79A, the nucleotide sequence in Table 79B, the nucleotide sequence in Table 81, and a combination of two or more of said nucleotide sequences.

[0178] In some embodiments, the invention provides a polynucleotide comprising two multi-epitope constructs, the first comprising the HBV multi-epitope construct in any of (a) to (aaa), above, and the second comprising HBV HTL epitopes such as those in (r-w), wherein the first and second multi-epitope constructs are not directly joined, and/or are not joined in the same frame.

[0179] Each first and second multi-epitope construct may be operably linked to a regulatoru sequence such as a promoter or an IRES. The polynucleotide comprising the first and second multi-epitope contructs may comprise, e.g., at least one promoter and at least one IRES, one promoter and one IRES, two promoters, or two or more promoters and/or IRESs. The promoter may be a CMV promoter or other promoter described herein or known in the art. In preferred embodiments, the two multi-epitope constructs have the structure shown in any one of Tables 47C, 52B, 58A, 63A-D, 70, 71, 74, 75, 78, 80, 82, 83, 84, 85. The second multi-epitope construct may encode a peptide comprising or consisting of an amino acid sequence selected from the group consisting the amino acid sequence shown in Table 50C, the amino acid sequence shown in Table 54A, the amino acid sequence shown in Table 54B, the amino acid sequence shown in Table 59, the amino acid sequence shown in Table 61, the amino acid sequence shown in Table 65A, the amino acid sequence shown in Table 65B, the amino acid sequence shown in Table 65C, the amino acid sequence shown in Table 65D, the amino acid sequence shown in Table 69, the amino acid sequence shown in Table 72A, the amino acid sequence shown in Table 72E, the amino acid sequence shown in Table 73A, the amino acid sequence shown in Table 76A, the amino acid sequence shown in Table 76C, the amino acid sequence shown in Table 79A, the amino acid sequence shown in Table 79B, the amino acid sequence shown in Table 81, and a combination of two or more of said amino acid sequences. The second multi-epitope construct may comprises a nucleic acid sequence selected from the nucleotide sequence the nucleotide sequence in Table 49C, the nucleotide sequence in Table 53A, the nucleotide sequence in Table 53B, the nucleotide sequence in Table 59, the nucleotide sequence in Table 61, the nucleotide sequence in Table 64A, the nucleotide sequence in Table 64B, the nucleotide sequence in Table 64C, the nucleotide sequence in Table 64D, the nucleotide sequence in Table 72B, the nucleotide sequence in Table 72F, the nucleotide sequence in Table 73B, the nucleotide sequence in Table 76B, the nucleotide sequence in Table 76D, the nucleotide sequence in Table 79A, the nucleotide sequence in Table 79B, the nucleotide sequence in Table 81, and a combination of two or more of said nucleotide sequences.

[0180] In other embodiments, the invention provides peptides encoded by the polynucleotides described above, for example, a peptide comprising or alternatively consisting of:

[0181] (a) a multi-epitope construct comprising nucleic acids encoding the human papillomavirus (HPV) cytotoxic T lymphocyte (CTL) epitopes HPV16.E1.214, HPV16.E1.254, HPV16.E1.314, HPV16.E1.420, HPV16.E1.585, HPV16.E2.130, HPV16.E2.329, HPV16/52.E2.151, HPV18.E1.592, HPV18.E2.136, HPV18.E2.142, HPV18.E2.15, HPV18.E2.154, HPV18.E2.168, HPV18.E2.230, HPV18/45.E1.321, HPV18/45.E1.491, HPV31.E1.272, HPV31.E1.349, HPV31.E1.565, HPV31.E2.11, HPV31.E2.130, HPV31.E2.138, HPV31.E2.205, HPV31.E2.291, HPV31.E2.78, HPV45.E1.232, HPV45.E1.252, HPV45.E1.399, HPV45.E1.411, HPV45.E1.578, HPV45.E2.137, HPV45.E2.144, HPV45.E2.17, HPV45.E2.332, and HPV45.E2.338, wherein the nucleic acids are directly or indirectly joined to one another in the same reading frame;

[0182] (b) the multi-epitope construct of (a), further comprising nucleic acids encoding the human papillomavirus (HPV) cytotoxic T lymphocyte (CTL) epitopes HPV16.E1.493, HPV31/52.E1.557, HPV31.E2.131, HPV31.E2.127, HPV16.E2.335, HPV16.E2.37, HPV16.E2.93, HPV18.E2.211, HPV18.E2.61, HPV18.E1.266, and HPV18.E1.500, directly or indirectly joined in the same reading frame to said CTL epitope nucleic acids of (a);

[0183] (c) the multi-epitope construct of (a), further comprising nucleic acids encoding the human papillomavirus (HPV) cytotoxic T lymphocyte (CTL) epitopes HPV16.E1.191, HPV16.E1.292, HPV16.E1.489, HPV16.E1.489, HPV16/52.E1.406, HPV18.E1.210, HPV18.E1.266, HPV18.E1.463, HPV31.E1.464, HPV18/45.E1.284, and HPV31.E1.441 directly or indirectly joined in the same reading frame to said CTL epitope nucleic acids of (a);

[0184] (d) the multi-epitope construct of (a), further comprising nucleic acids encoding the human papillomavirus (HPV) cytotoxic T lymphocyte (CTL) epitopes HPV16.E1.191, HPV16.E1.292, HPV16.E1.489, HPV16.E1.489, HPV16/52.E1.406, HPV18.E1.210, HPV18.E1.266, HPV18.E1.463, HPV31.E1.464, HPV18/45.E1.284, and HPV31.E1.441 directly or indirectly joined in the same reading frame to said CTL epitope nucleic acids of (a);

[0185] (e) a multi-epitope construct comprising nucleic acids encoding the human papillomavirus (HPV) cytotoxic T lymphocyte (CTL) epitopes HPV16.E6.106, HPV16.E6.29.L2, HPV16.E6.68.R10, HPV16.E6.75.F9, HPV16.E6.75.L2, HPV16.E6.77, HPV16.E6.80.D3, HPV16.E7.11.V10, HPV16.E7.2.T2, HPV16.E7.56.F10, HPV16.E7.86.V8, HPV18.E6.24, HPV18.E6.25.T2, HPV18.E6.53.K10, HPV18.E6.72.D3, HPV18.E6.83.R10, HPV18.E6.84.V10, HPV18.E6.89, HPV18.E6.92.V10, HPV18.E7.59. R9, HPV18/45.E6.13, HPV18/45.E6.98.F9, HPV31.E6.132.K10, HPV31.E6.15, HPV31.E6.72, HPV31.E6.73 D3, HPV31.E6.80, HPV31.E6.82R9, HPV31.E6.83, HPV31.E6.90, HPV31.E7.44.T2, HPV33.E7.11V10, HPV45.E6.24, HPV45.E6.25 T2, HPV45.E6.37, HPV45.E6.41.R10, HPV45.E6.44, HPV45.E6.54, HPV45.E6.54.V10, HPV45.E6.71.F10, HPV45.E6.84.R9 and HPV45.E7.20, wherein the nucleic acids are directly or indirectly joined to one another in the same reading frame;

[0186] (f) the multi-epitope construct of (e), further comprising nucleic acids encoding the human papillomavirus (HPV) cytotoxic T lymphocyte (CTL) epitopes HPV16.E6.131, HPV18.E6.126.F9, HPV31.E6.69, HPV18.E6.33.F9, directly or indirectly joined in the same reading frame to said CTL epitope nucleic acids of (d);

[0187] (g) the the multi-epitope construct of (e), further comprising nucleic acids encoding the human papillomavirus (HPV) cytotoxic T lymphocyte (CTL) epitopes HPV18.E6.33, HPV16.E6.87, HPV18.E6.44, HPV31.E6.69+R@68, directly or indirectly joined in the same reading frame to said CTL epitope nucleic acids of (d);

[0188] (h) the multi-epitope construct of (a) or (b) or (c) or (d) or (e) or (f) or (g), further comprising one or more spacer nucleic acids encoding one or more spacer amino acids, directly or indirectly joined in the same reading frame to said CTL epitope nucleic acids;

[0189] (i) the multi-epitope construct of (h), wherein said one or more spacer nucleic acids are positioned between the CTL epitope nucleic acids of (a), between the CTL epitope nucleic acids of (b), between the CTL epitope nucleic acids of (c), between the CTL epitope nucleic acids of (d), between the CTL epitope nucleic acids of (a) and (b), between the CTL epitope nucleic acids of (a) and (c), between the CTL epitope nucleic acids of (a) and (d), between the CTL epitope nucleic acids of (e), between the CTL epitope nucleic acids of (f), between the CTL epitope nucleic acids of (g), between the CTL epitope nucleic acids of (e) and (f), or between the CTL epitope nucleic acids of (e) and (g);

[0190] (j) the multi-epitope construct of (h) or (i), wherein said one or more spacer nucleic acids each encode 1 to 8 amino acids;

[0191] (k) the multi-epitope construct of any of (h) to (j), wherein two or more of said spacer nucleic acids encode different (i.e., non-identical) amino acid sequences;

[0192] (l) the multi-epitope construct of any of (h) to (k), wherein two or more of said spacer nucleic acids encode an amino acid sequence different from an amino acid sequence encoded by one or more other spacer nucleic acids;

[0193] (m) the multi-epitope construct of any of (h) to (l), wherein two or more of the spacer nucleic acids encodes the identical amino acid sequence;

[0194] (n) the multi-epitope construct of any of (h) to (m), wherein one or more of said spacer nucleic acids encode an amino acid sequence comprising or consisting of three consecutive alanine (Ala) residues;

[0195] (o) the multi-epitope construct of any of (a) to (n), further comprising one or more nucleic acids encoding one or more HTL epitopes, directly or indirectly joined in the same reading frame to said CTL epitope nucleic acids and/or said spacer nucleic acids;

[0196] (p) the multi-epitope construct of (o), wherein said one or more HTL epitopes comprises a PADRE epitope;

[0197] (q) the multi-epitope construct of (o) or (p), wherein said one or more HTL epitopes comprise one or more HPV HTL epitopes;

[0198] (r) the multi-epitope construct of (q), wherein said one or more HPV HTL epitopes comprise HPV16.E1.319,HPV16.E1.337, HPV18.E1.258, HPV18.E1.458, HPV18.E2.140, HPV31.E1.015, HPV31.E1.317, HPV31.E2.67, HPV45.E1.484, HPV45.E1.510, and HPV45.E2.352;

[0199] (s) the multi-epitope construct of (r), wherein said one or more HPV HTL epitopes further comprise HPV16.E2.156, HPV16.E2.7, HPV18.E2.277, HPV31.E2.354, and HPV45.E2.67;

[0200] (t) the multi-epitope construct of (r), wherein said one or more HPV HTL epitopes further comprise HPV16.E2.160, HPV16.E2.19, HPV18.E2.127, HPV18.E2.340, and HPV31.E2.202;

[0201] (u) the multi-epitope construct of (q), wherein said one or more HPV HTL epitopes comprise HPV16.E6.13, HPV16.E6.130, HPV16.E7.13, HPV16.E7.46, HPV16.E7.76, HPV18.E6.43, HPV31.E6.132, HPV31.E6.42, HPV31.E6.78, HPV45.E6.127, and HPV45.E7.10;

[0202] (v) the multi-epitope construct of (u), wherein said one or more HPV HTL epitopes further comprise HPV18.E6.94, HPV18.E7.78, HPV31.E6.1, HPV31.E7.36, and HPV45.E7.82;

[0203] (w) the multi-epitope construct of (u), wherein said one or more HPV HTL epitopes further comprise HPV18.E6.52 and 53, HPV18.E6.94+Q, HPV18.E7.86, HPV31.E7.76, and HPV45.E6.52;

[0204] (x) the multi-epitope construct of any of (o) to (w), further comprising one or more spacer nucleic acids encoding one or more spacer amino acids directly or indirectly joined in the same reading frame between a CTL epitope and an HTL epitope or between HTL epitopes;

[0205] (y) the multi-epitope construct of (x), wherein said spacer nucleic acid encodes an amino acid sequence selected from the group consisting of: an amino acid sequence comprising or consisting of GPGPG (SEQ ID NO:______), an amino acid sequence comprising or consisting of PGPGP (SEQ ID NO:______), an amino acid sequence comprising or consisting of (GP)n, an amino acid sequence comprising or consisting of (PG)n, an amino acid sequence comprising or consisting of (GP)nG, and an amino acid sequence comprising or consisting of (PG)ₙP, where n is an integer between zero and eleven;

[0206] (z) the multi-epitope construct of any of (a) to (y), further comprising one or more MHC Class I and/or MHC Class II targeting nucleic acids;

[0207] (aa) the multi-epitope construct of (z), wherein said one or more targeting nucleic acids encode one or more targeting sequences selected from the group consisting of: an Ig kappa signal sequence, a tissue plasminogen activator signal sequence, an insulin signal sequence, an endoplasmic reticulum signal sequence, a LAMP-1 lysosomal targeting sequence, a LAMP-2 lysosomal targeting sequence, an HLA-DM lysosomal targeting sequence, an HLA-DM-association sequence of HLA-DO, an Ig-a cytoplasmic domain, Ig-ss cytoplasmic domain, a li protein, an influenza matrix protein, an HCV antigen, and a yeast Ty protein;

[0208] (bb) the multi-epitope construct of any of (a) to (aa), which is optimized for CTL and/or HTL epitope processing;

[0209] (cc) the multi-epitope construct of any of (a) to (bb), wherein said CTL nucleic acids are sorted to minimize the number of CTL and/or HTL junctional epitopes encoded therein;

[0210] (dd) the multi-epitope construct of any of (q) to (cc), wherein said HTL nucleic acids are sorted to minimize the number of CTL and/or HTL junctional epitopes encoded therein; (ee) the multi-epitope construct of any of (a) to (dd) further comprising one or more nucleic acids encoding one or more flanking amino acid residues;

[0211] (ff) the multi-epitope construct of (ee), wherein said one or more flanking amino acid residues are selected from the group consisting of: K, R, N, Q, G, A, S, C, and T at a C+1 position of one of said CTL epitopes;

[0212] (gg) the multi-epitope construct of any of (e), (f), (h)-(n), (z)-(cc), (ee) or (ff), wherein said HPV CTL epitopes are directly or indirectly joined in the order shown in Table 47C;

[0213] (hh) the multi-epitope construct of any of (e), (g), (h)-(n), (z)-(cc), (ee) or (ff), wherein the HPV CTL epitopes are directly or indirectly joined in the order shown in Table 85;

[0214] (ii) the multi-epitope construct of any of (a), (b), (h)-(n), (z)-(cc), (ee) or (ff), wherein the HPV CTL epitopes are directly or indirectly joined in the order shown in Table 52A;

[0215] (jj) the multi-epitope construct of any of (a), (b), (h)-(n), (z)-(cc), (ee) or (ff), wherein the HPV CTL epitopes are directly or indirectly joined in the order shown in Table 52B;

[0216] (kk) the multi-epitope construct of any of (a), (c), (h)-(n), (z)-(cc), (ee) or (ff), wherein the HPV CTL epitopes are directly or indirectly joined in the order shown in Table 74;

[0217] (ll) the multi-epitope construct of any of (a), (c), (h)-(n), (z)-(cc), (ee) or (ff), wherein the HPV CTL epitopes are directly or indirectly joined in the order shown in Table 75;

[0218] (mm) the multi-epitope construct of any of (a), (d), (h)-(n), (z)-(cc), (ee) or (ff), wherein the HPV CTL epitopes are directly or indirectly joined in the order shown in Table 83;

[0219] (nn) the multi-epitope construct of any of (r), (t), (x)-(bb), (dd) or (ff), wherein the HPV HTL epitopes are directly or indirectly joined in the order shown in Table 58A;

[0220] (oo) the multi-epitope construct of any of (r), (t), (x)-(bb), (dd) or (ff), wherein the HPV HTL epitopes are directly or indirectly joined in the order shown in Table 58B;

[0221] (pp) the multi-epitope construct of any of (u), (v), (x)-(bb), (dd) or (ff), wherein the HPV HTL epitopes are directly or indirectly joined in the order of the HTL epitopes shown in Table 70;

[0222] (qq) the multi-epitope construct of any of (u), (w), (x)-(bb), (dd) or (ff), wherein the HPV HTL epitopes are directly or indirectly joined in the order shown in Table 80;

[0223] (rr) the multi-epitope construct of any of (e), (f), (h)-(n), (r), (s), or (x)-(ff), wherein the HPV HTL epitopes are directly or indirectly joined in the order shown in Table 78;

[0224] (ss) the multi-epitope construct of (e), (f), (h)-(n), (u), (v), or (x)-(ff), wherein said HPV CTL epitopes and said HPV HTL epitopes are directly or indirectly joined in the order shown in Table 70;

[0225] (tt) the multi-epitope construct of (e), (g), (h)-(n), (u), (v), or (x)-(ff), wherein said HPV CTL epitopes and said HPV HTL epitopes are directly or indirectly joined in the order shown in Table 71;

[0226] (uu) the multi-epitope construct of (a), (b), (h)-(n), (r), (t), or (x)-(ff), wherein said HPV CTL epitopes and said HPV HTL epitopes are directly or indirectly joined in the order shown in Table 63A;

[0227] (vv) the multi-epitope construct of (a), (b), (h)-(n), (r), (t), or (x)-(ff), wherein said HPV CTL epitopes and said HPV HTL epitopes are directly or indirectly joined in the order shown in Table 63C;

[0228] (ww) the multi-epitope construct of (a), (b), (h)-(n), (r), (t), or (x)-(ff), wherein said HPV CTL epitopes and said HPV HTL epitopes are directly or indirectly joined in the order shown in Table 63B;

[0229] (xx) the multi-epitope construct of (a), (b), (h)-(n), (r), (t), or (x)-(ff), wherein said HPV CTL epitopes and said HPV HTL epitopes are directly or indirectly joined in the order shown in Table 63D;

[0230] (yy) the multi-epitope construct of (a), (c), (h)-(n), (r), (s), or (x)-(ff), wherein said HPV CTL epitopes and said HPV HTL epitopes are directly or indirectly joined in the order shown in Table 84;

[0231] (zz) the multi-epitope construct of any of (a) to (ff), wherein said construct encodes a polypeptide comprising or consisting of an amino acid sequence selected from the group consisting of: the amino acid sequence shown in Table 50C, the amino acid sequence shown in Table 54A, the amino acid sequence shown in Table 54B, the amino acid sequence shown in Table 59, the amino acid sequence shown in Table 61, the amino acid sequence shown in Table 65A, the amino acid sequence shown in Table 65B, the amino acid sequence shown in Table 65C, the amino acid sequence shown in Table 65D, the amino acid sequence shown in Table 69, the amino acid sequence shown in Table 72A, the amino acid sequence shown in Table 72E, the amino acid sequence shown in Table 73A, the amino acid sequence shown in Table 76A, the amino acid sequence shown in Table 76C, the amino acid sequence shown in Table 79A, the amino acid sequence shown in Table 79B, the amino acid sequence shown in Table 81, and a combination of two or more of said amino acid sequences; and

[0232] (aaa) the multi-epitope construct of any of (a) to (ff), wherein said construct comprises a nucleic acid sequence selected from the group consisting of: the nucleotide sequence in Table 49C, the nucleotide sequence in Table 53A, the nucleotide sequence in Table 53B, the nucleotide sequence in Table 59, the nucleotide sequence in Table 61, the nucleotide sequence in Table 64A, the nucleotide sequence in Table 64B, the nucleotide sequence in Table 64C, the nucleotide sequence in Table 64D, the nucleotide sequence in Table 72B, the nucleotide sequence in Table 72F, the nucleotide sequence in Table 73B, the nucleotide sequence in Table 76B, the nucleotide sequence in Table 76D, the nucleotide sequence in Table 79A, the nucleotide sequence in Table 79B, the nucleotide sequence in Table 81, and a combination of two or more of said nucleotide sequences.

[0233] In other embodiments, the invention provides cells comprising the polynucleotides and/or polypeptides above; compositions comprising the polynucleotides and/or polypeptides and/or cells; methods for making these polynucleotides, polypeptides, cells and compositions; and methods for stimulating an immune response (e.g. therapeutic and/or prophylactic methods) utilizing these polynucleotides and/or polypeptides and/or cells and/or compositions. The invention is described in further detail below.

### BRIEF DESCRIPTION OF THE DRAWINGS

[0234] FIG. 1 illustrates a computer system for performing automatic optimization of multi-epitope constructs in accordance with certain embodiments of the invention.

[0235] FIGS. 2A and 2B illustrate an exemplary input text file containing user input parameters used for executing a Junctional Analyzer program, in accordance with certain embodiments of the invention.

[0236] FIG. 3 illustrates a flow chart diagram of a software program of the invention for identifying optimal multi-epitope constructs, in accordance with certain embodiments of the invention.

[0237] FIGS. 4A, 4B, 4C, and 4D illustrate an exemplary output text file containing output results of a Junctional Analyzer program, in accordance with certain embodiments of the invention.

[0238] FIG. 5 illustrates allele specific motifs of five A3 supertype alleles: A*0301, A*1101, A*3101, A*3301, and A*6801. Individual residues, or groups of residues, associated for each non-anchor position with either good (“preferred”) or poor (“deleterious”) binding capacities to each individual allele are shown.

[0239] FIG. 6 illustrates the A3 supermotif. Numbers in parenthesis indicate the number of molecules for which the residue or residue group was preferred or deleterious.

[0240] FIGS. 7A and 7B summarize the motifs for the B7 supertype alleles (FIG. 7A) and for the B7 supermotif (FIG. 7B, first panel). The second panel of FIG. 7B illustrates the B7 supermotif. Values in parenthesis indicate the frequency that a residue or residue group was preferred or deleterious.

[0241] FIG. 8 illustrates relative average binding capacity of the A*0101 motif 9-mer peptides as a function of the different amino acid residues occurring at each of the non-anchor positions. The first two panels of FIG. 8 depict data, while the second two panels depict graphics. Data sets from either 2-9, 3-9 peptide sets were analyzed and tabulated. The 2-9 and 3-9 sets contained 101 and 85 different peptides, respectively. Maps of secondary effects influencing the binding capacity of 9-mer peptides carrying the 2-9, 3-9, and A*0101 motifs are also shown.

[0242] FIG. 9 illustrates relative average binding capacity of the A*0101 10-mer peptides as a function of the different amino acid residues occurring at each of the non-anchor positions. Data sets from either 2-10 or 3-10 motif sets of peptides were analyzed and tabulated. The 2-10 and 3-10 sets contained 91 and 89 different peptides, respectively. Maps of secondary effects influencing the binding capacity of 10-mer peptides carrying the 2-10 and/or 3-10 A1 motifs are also presented.

[0243] FIG. 10 illustrates preferred and deleterious secondary anchor residues for the refined A24 9-mer and 10-mer motifs.

[0244] FIGS. 11A and 11B illustrate immunogenicity data for peptides contained within the minigene constructs HPV43-3, HPV43-3R, HPV43-4 and HPV43-4R. Immunogenicity was assessed in ELISA assays by detecting the amount of secreted IFN-γ using a monoclonal antibody specific for murine IFN-γ. The IFN-γ ELISA data was converted to secretory units (“SU”) for evaluation. The SU calculation was based on the number of cells that secrete 100 pg of IFN-γ in response to a particular peptide, corrected for the background amount of IFN-γ produced in the absence of peptide.

[0245] FIGS. 12A and 12B illustrate immunogenicity data for peptides contained within the minigene constructs HPV43-3R, HPV43-3RC and HPV43-3RN. Immunogenicity was assessed using ELISA assays as described above.

[0246] FIGS. 13A and 13B illustrate immunogenicity data for peptides contained within the minigene constructs HPV43-3R, HPV43-3RC and HPV43-3RN. Immunogenicity was assessed in ELISPOT assays used to measure MHC class II restricted responses. Purified splenic cells (4×10⁵/well), isolated using MACS columns (Milteny), and irradiated splenocytes (1×10⁵ cells/well) were added to membrane-backed 96 well ELISA plates (Millipore) pre-coated with monoclonal antibody specific for murine IFN-γ (Mabtech). Cells were cultured with 10 μg/ml peptide for 20 hours at 37 degrees C. The IFN-γ secreting cells were detected by incubation with biotinylated anti-mouse IFN-γ antibody (Mabtech), followed by incubation with Avidin-Peroxidase Complex (Vectastain). The plates were developed using AEC (3-amino-9-ethyl-carbazole; Sigma), washed and dried. Spots were counted using the Zeiss KS ELISPOT reader. The results are presented as the number of IFN-γ spot forming cells (“SFC”) per 10⁶ T cells.

[0247] FIGS. 14A and 14B illustrate immunogenicity data for peptides contained within the minigene constructs HPV43-4R, HPV43-4RC and HPV43-4RN. Immunogenicity was assessed using ELISA assays as described above.

[0248] FIGS. 15A and 15B illustrate immunogenicity data for peptides contained within the minigene constructs HPV43-4R, HPV43-4RC and HPV43-4RN. Immunogenicity was assessed in ELISPOT assays as described above.

[0249] FIGS. 16A and 16B illustrate immunogenicity data for peptides contained within the minigene constructs HPV46-5 and HPV46-6. Immunogenicity was assessed using ELISA assays as described above.

[0250] FIGS. 17A and 17B illustrate immunogenicity data for peptides contained within the minigene constructs HPV46-5 and HPV46-6. Immunogenicity was assessed in ELISPOT assays as described above.

[0251] FIGS. 18A and 18B illustrate immunogenicity data for peptides contained within the minigene constructs HPV47-1 and HPV47-2. Immunogenicity was assessed using ELISA assays as described above.

[0252] FIGS. 19A and 19B illustrate immunogenicity data for peptides contained within the minigene constructs HPV46-5 and HPV46-5/HTL5. Immunogenicity was assessed in ELISPOT assays as described above.

[0253] FIGS. 20A and 20B illustrate immunogenicity data for peptides contained within the minigene constructs HPV64, HPV64R and a peptide pool. Immunogenicity was assessed using ELISA assays as described above.

[0254] FIGS. 21A and 21B illustrate immunogenicity data for peptides contained within the minigene constructs HPV46-5 and HPV46-5.2/HTL-20. Immunogenicity was assessed ELISPOT assays as described above.

[0255] FIGS. 22A and 22B illustrate immunogenicity data for peptides contained within the minigene constructs HPV46-5 and HPV46-5.2/HTL-20. Immunogenicity was assessed in ELISPOT assays as described above.

[0256] FIGS. 23A and 23B illustrate immunogenicity data for peptides contained within the minigene constructs HPV46-5 and HPV46-5.2 as compared to HPV 46-5.3. Immunogenicity was assessed in ELISPOT assays as described above.

[0257] FIGS. 24A and 24B illustrate immunogenicity data for peptides contained within the minigene constructs HPV46-5 and HPV46-5.2 as compared to HPV 46-5.3. Immunogenicity was assessed in ELISPOT assays as described above.

[0258] FIGS. 25A and 25B illustrate immunogenicity data for peptides contained within the minigene constructs HPV46-5 and HPV46-5.2 as compared to HPV 46-5.3. Immunogenicity was assessed in ELISPOT assays as described above.

[0259] FIGS. 26A and 26B illustrate immunogenicity data for peptides contained within the minigene constructs HPV46-5 and HPV46-5.2 as compared to HPV 46-5.3. Immunogenicity was assessed in ELISPOT assays as described above.

[0260] FIGS. 27A and 27B illustrate immunogenicity data for peptides contained within the minigene constructs HPV47-1 and HPV47-2. Immunogenicity was assessed in ELISPOT assays as described above.

[0261] FIG. 28 illustrates immunogenicity data for peptides contained within the minigene constructs HPV47-1 and HPV47-2. Immunogenicity was assessed in ELISPOT assays as described above.

[0262] FIG. 29 illustrates immunogenicity data for peptides contained within the minigene constructs HPV47-1 and HPV47-2. Immunogenicity was assessed in ELISPOT assays as described above.

[0263] FIG. 30 illustrates immunogenicity data for peptides contained within the minigene constructs E1/E2 HTL 780.21 and 780.22. Immunogenicity was assessed in ELISPOT assays as described above.

[0264] FIG. 31 illustrates immunogenicity data for peptides contained within the minigene constructs E1/E2 HTL 780.21 fix and 780.22 fix. Immunogenicity was assessed in ELISPOT assays as described above.

[0265] FIGS. 32A and 32B illustrate immunogenicity data for peptides contained within the minigene constructs HPV47-1, HPV47-1/HTL-21 and HPV47-1/HTL-22. Immunogenicity was assessed in ELISPOT assays as described above.

[0266] FIGS. 33A and 33B illustrate immunogenicity data for peptides contained within the minigene constructs HPV47-2, HPV47-2/HTL-21 and HPV47-2/HTL-22. Immunogenicity was assessed in ELISPOT assays as described above.

[0267] FIGS. 34A and 34B illustrate immunogenicity data for peptides contained within the minigene constructs HPV47-3 and HPV47-4. Immunogenicity was assessed in ELISPOT assays as described above.

[0268] FIG. 35 illustrates immunogenicity data for peptides contained within the minigene constructs HPV47-3 and HPV47-4. Immunogenicity was assessed in ELISPOT assays as described above.

[0269] FIG. 36 illustrates immunogenicity data for peptides contained within the minigene constructs HPV47-3 and HPV47-4. Immunogenicity was assessed in ELISPOT assays as described above.

### DETAILED DESCRIPTION OF THE INVENTION

[0270] The peptides and corresponding nucleic acid compositions of the present invention are useful for stimulating an immune response to HPV by stimulating the production of CTL and/or HTL responses. The peptide epitopes, which are derived directly or indirectly from naturally occurring HPV protein amino acid sequences, are able to bind to HLA molecules and stimulate an immune response to HPV. The complete sequence of the HPV proteins to be analyzed can be obtained from Genbank. The complete sequences of HPV proteins analyzed with regard to certain embodiments of the invention as disclosed herein are provided herein in Table 1. Epitopes and analogs of HPV can also be identified from the HPV sequences provided in Table 1 according to the methods of the invention. In certain embodiments, epitopes and analogs can also be readily determined from sequence information that may subsequently be discovered for heretofore unknown variants of HPV, as will be clear from the disclosure provided below.

TABLE 1

HPV STRAINS AND AMINO ACID SEQUENCES OF
HPV PROTEINS

| Stain | | | |
|---|---|---|---|
| and | Acces- | SEQ | |
| Pro- | sion | ID | |
| tein | No. | NO | Sequence |
| HPV6A | | | MADDSGTENEGSGCTGWFMVEAIVQHPTGTQISD |
| E1 | | | DEDEEVEDSGYDMVDFIDDSNITHNSLEAQALFN |
| | | | RQEADTHYATVQDLKRKYLGSPYVSPINTIAEAV |
| | | | ESEISPRLDAIKLTRQPKKVKRRLFQTRELTDSG |
| | | | YGYSEVEAGTGTQVEKHGVPENGGDGQEKDTGRD |
| | | | IEGEEHTEAEAPTNSVREHAGTAGILELLKCKDL |
| | | | RAALLGKFKECFGLSFIDLIRPFKSDKTTCADWV |
| | | | VAGFGIHHSISEAFQKLIEPLSLYAHIQWLTNAW |
| | | | GMVLLVLVRFKVNKSRSTVARTLATLLNIPDNQM |
| | | | LIEPPKIQSGVAALYWFRTGISNASTVIGEAPEW |
| | | | ITRQTVIEHGLADSQFKLTEMVQWAYDNDICEES |
| | | | EIAFEYAQRGDFDSNARAFLNSNMQAKYVKDCAT |
| | | | MCRHYKHAEMRKMSIKQWIKHRGSKIEGTGNWKP |
| | | | IVQFLRHQNIEFIPFLSKFKLWLHGTPKKNCIAI |
| | | | VGPPDTGKSYFCMSLISFLGGTVISHVNSSSHFW |
| | | | LQPLVDAKVALLDDATQPCWIYMDTYMRNLLDGN |
| | | | PMSIDRKHKALTLIKCPPLLVTSNIDITKEEKYK |
| | | | YLHTRVTTFTFPNPFPFDRNGNAVYELSNANWKC |
| | | | FFERLSSSLDIQDSEDEEDGSNSQAFRCVPGTVV |
| | | | RTL |
| HPV6A | | | MEAIAKRLDACQEQLLELYEENSTDLNKHVLHWK |
| E2 | | | CMRHESVLLYKAKQMGLSHIGMQVVPPLKVSEAK |
| | | | GHNAIEMQMHLESLLKTEYSMEPWTLQETSYEM |
| | | | WQTPPKRCFKKRGKTVEVKFDGCANNTMDYVV |
| | | | WTDVYVQDTDSWVKVHSMVDAKGIYYTCGQFKT |
| | | | YYVNFVKEAEKYGSTKQWEVCYGSTVICSPASVS |
| | | | STTQEVSIPESTTYTPAQTSTPVSSSTQEDAVQT |
| | | | PPRKRARGVQQSPCNALCVAHIGPVDSGNHNLIT |
| | | | NNHDQHQRRNNSNSSATPIVQFQGESNCLKCFRY |
| | | | RLNDKHRHLFDLISSTWHWASPKAPHKHAIVTVT |
| | | | YHSEEQRQQFLNVVKIPPTIRHKLGFMSLHLL |
| HPV6A | | | MAAQLYVLLHLYLALHKKYPFLNLLHTPPHRPPP |
| E4 | | | LCPQAPRKTQCKRRLENEHEESNSHLATPCVWPT |
| | | | LDPWTVETTTSSLTITTSTKEGTTVTVQLRL |
| HPV6A | | | MEVVPVQIAAGTTSTLILPVIIAFVVCFVSIILI |
| E5 | | | VWISDFIVYTSVLVLTLLLYLLLWLLLTTPLQFF |
| | | | LLTLLVCYCPALYIHHYIVNTQQ |
| HPV6A | | | MESANASTSATTIDQLCKTFNLSMHTLQINCVFC |
| E6 | | | KNALTTAEIYSYAYKQLKVLFRGGYPYAACACCL |
| | | | EFHGKINQYRHFDYAGYATTVEEETKQDILDVLI |
| | | | RCYLCHKPLCEVEKVKHILTKARFIKLNCTWKGR |
| | | | CLHCWTTTCMEDMLP |
| HPV6A | | | MHGRHVTLKDIVLDLQPPDPVGLHCYEQLVDSSE |
| E7 | | | DEVDEVDGQDSQPLKQHFQIVTCCCGCDSNVRLV |
| | | | VQCTETDIREVQQLLLGTLDIVCPICAPKT |
| HPV6A | | | MWRPSDSTVYVPPPNPVSKVVATDAYVTRTNIFY |
| L1 | | | HASSSRLLAVGHPYFSIKRANKTVVPKVSGYQYR |
| | | | VFKVVLPDPNKFALPDSSLFDPTTQRLVWACTGL |
| | | | EVGRGQPLGVGVSGHPFLNKYDDVENSGSGGNPG |
| | | | QDNRVNVGMDYKQTQLCMVGCAPPLGEHWGKGKQ |
| | | | CTNTPVQAGDCPPLELITSVIQDGDMVDTGFGAM |
| | | | NFADLQTNKSDVPIDICGTTCKYPDYLQMAADPY |
| | | | GDRLFFFLRKEQMFARHFFNRAGEVGEPVPDTLI |
| | | | IKGSGNRTSVGSSIYVNTPSGSLVSSEAQLFNKP |
| | | | YWLQKAQGHNNGICWGNQLFVTVVDTTRSTNMTL |
| | | | CASVTTSSTYTNSDYKEYMRHVEEYDLQFIFQLC |
| | | | SITLSAEVMAYIHTMNPSVLEDWNFGLSPPPNGT |
| | | | LEDTYRYVQSQAITCQKPTPEKEKPDPYKNLSFW |
| | | | EVNLKEKFSSELDQYPLGRKFLLQSGYRGRSSIR |
| | | | TGVKRPAVSKASAAPKRKRAKTKR |
| HPV6A | | | MAHSRARRRKRASATQLYQTCKLTGTCPPDVIPK |
| L2 | | | VEHNTIADQILKWGSLGVFFGGLGIGTGSGTGGR |
| | | | TGYVPLGTSAKPSITSGPMARPPVVVEPVAPSDP |
| | | | SIVSLIEESAIINAGAPEIVPPAHGGFTITSSET |
| | | | TTPAILDVSVTSHTTTSIFRNPVFTEPSVTQPQP |
| | | | PVEANGHILISAPTITSHPIEEIPLDTFVISSSD |
| | | | SGPTSSTPVPGTAPRPRVGLYSRALHQVQVTDPA |
| | | | FLSTPQRLITYDNPVYEGEDVSVQFSHDSIHNAP |
| | | | DEAFMDIIRLHRPAIASRRGLVRYSRIGQRGSMH |
| | | | TRSGKHIGARIHYFYDISPIAQAAEEIEMHPLVA |
| | | | AQDDTFDIYAESFEPDINPTQHPVTNISDTYLTS |
| | | | TPNTVTQPWGNTTVPLSSIPNDLFLQSGPDITFP |
| | | | TAPMGTPFSPVTALPTGPVFITGSGFYLHPAWYF |
| | | | ARKRRKRIPLFFSDVAA |
| HPV6B | | | MADDSGTENEGSGCTGWFMVEAIVQHPTGTQISD |
| E1 | | | DEDEEVEDSGYDMVDFDDSNITHNSLEAQALFNR |
| | | | QEADTHYATVQDLKRKYLGSPYVSPINTIAEAVE |
| | | | SEISPRLDAIKLTRQPKKVKRRLFQTRELTDSGY |
| | | | GYSEVEAGTGTQVEKHGVPENGGDGQEKDTGRDI |
| | | | EGEEHTEAEAPTNSVREHAGTAGILELLKCKDLR |
| | | | AALLGKFKECFGLSFIDLIRPFKSDKTTCLDWVV |
| | | | AGFGIHHSISEAFQKLIEPLSLYAHIQWLTNAWG |
| | | | MVLLVLLRFKVNKSRSTVARTLATLLNIPENQML |
| | | | IEPPKIQSGVAALYWFRTGISNASTVIGEAPEWI |
| | | | TRQTVIEHGLADSQFKLTEMVQWAYDNDICEESE |
| | | | IAFEYAQRGDFDSNARAFLNSNMQAKYVKDCATM |
| | | | CRHYKHAEMRKMSIKQWIKHRGSKIEGTGNWKPI |
| | | | VQFLRHQNIEFIPFLTKFKLWLHGTPKKNCIAIV |
| | | | GPPDTGKSYFCMSLISFLGGTVISHVNSSSHFWL |
| | | | QPLVDAKVALLDDATQPCWIYMDTYMRNLLDGNP |
| | | | MSIDRKHKALTLIKCPPLLVTSNIDITKEDKYKY |
| | | | LHTRVTTFTFPNPFPFDRNGNAVYELSNTNWKCF |
| | | | FERLSSSLDIQDSEDEEDGSNSQAFRCVPGTVVR |
| | | | TL |
| HPV6B | | | MEAIAKRLDACQEQLLELYEENSTDLHKHVLHWK |
| E2 | | | CMRHESVLLYKAKQMGLSHIGMQVVPPLKVSEAK |
| | | | GHNAIEMQMHLESLLRTEYSMEPWTLQETSYEM |
| | | | WQTPPKRCFKKRGKTVEVKFDGCANNTMDYVV |
| | | | WTDVYVQDNDTWVKVHSMVDAKGIYYTCGQFK |
| | | | TYYVNFVKEAEKYGSTKHWEVCYGSTVICSPASV |
| | | | SSTTQEVSIPESTTYTPAQTSTLVSSSTKEDAVQ |
| | | | TPPRKRARGVQQSPCNALCVAHIGPVDSGNHNLI |
| | | | TNNHDQHQRRNNSNSSATPIVQFQGESNCLKCFR |
| | | | YRLNDRHRHLFDLISSTWHWASSKAPHKHAIVTV |
| | | | TYDSEEQRQQFLDVVKIPPTISHKLGFMSLHLL |
| HPV6B | | | MGAPNIGKYVMAAQLYVLLHLYLALHKKYPFLN |
| E4 | | | LLHTPPHRPPPLCPQAPRKTQCKRRLGNEHEESN |
| | | | SPLATPCVWPTLDPWTVETTTSSLTITTSTKDGT |
| | | | TVTVQLRL |
| HPV6B | | | MEVVPVQIAAGTTSTFILPVIIAFVVCFVSIILI |
| E5A | | | VWISEFIVYTSVLVLTLLLYLLLWLLLTTPLQFF |
| | | | LLTLLVCYCPALYIHYYIVTTQQ |
| HPV6B | | | MMLTCQFNDGDTWLGLWLLCAFIVGMLGLLLMH |
| E5B | | | YRAVQGDKHTKCKKCNKHNCNDDYVTMHYTTD |
| | | | GDYIYMN |
| HPV6B | | | MESANASTSATTIDQLCKTFNLSMHTLQINCVFC |
| E6 | | | KNALTTAEIYSYAYKHLKVLFRGGYPYAACACCL |
| | | | EFHGKINQYRHFDYAGYATTVEEETKQDILDVLI |
| | | | RCYLCHKPLCEVEKVKHILTKARFIKLNCTWKGR |
| | | | CLHCWTTCMEDMLP |
| HPV6B | | | MHGRHVTLKDIVLDLQPPDPVGLHCYEQLVDSSE |
| E7 | | | DEVDEVDGQDSQPLKQHFQIVTCCCGCDSNVRLV |
| | | | VQCTETDIREVQQLLLGTLNIVCPICAPKT |
| HPV6B | | | MWRPSDSTVYVPPPNPVSKVVATDAYVTRTNIFY |
| L1 | | | HASSSRLLAVGHPYFSIKRANKTVVPKVSGYQYR |
| | | | VFKVVLPDPNKFALPDSSLFDPTTQRLVWACTGL |
| | | | EVGRGQPLGVGVSGHPFLNKYDDVENSGSGGNPG |
| | | | QDNRVNVGMDYKQTQLCMVGCAPPLGEHWGKGKQ |
| | | | CTNTPVQAGDCPPLELITSVIQDGDMVDTGFGAM |
| | | | NFADLQTNKSDVPIDICGTTCKYPDYLQMAADPY |
| | | | GDRLFFFLRKEQMFARHFFNRAGEVGEPVPDTLI |
| | | | IKGSGNRTSVGSSIYVNTPSGSLVSSEAQLFNKP |
| | | | YWLQKAQGHNNGICWGNQLFVTVVDTTRSTNMTL |
| | | | CASVTTSSTYTNSDYKEYMRHVEEYDLQFIFQLC |
| | | | SITLSAEVMAYIHTMNPSVLEDWNFGLSPPPNGT |
| | | | LEDTYRYVQSQAITCQKPTPEKEKPDPYKNLSFW |
| | | | EVNLKEKFSSELDQYPLGRKFLLQSGYRGRSSIR |
| | | | TGVKRPAVSKASAAPKRKRAKTKR |
| HPV6B | | | MAHSRARRRKRASATQLYQTCKLTGTCPPDVIPK |
| L2 | | | VEHNTIADQILKWGSLGVFFGGLGIGTGSGTGGR |
| | | | TGYVPLQTSAKPSITSGPMARPPVVVEPVAPSDP |
| | | | SIVSLIEESAIINAGAPEIVPPAHGGFTITSSET |
| | | | TTPAILDVSVTSHTTTSIFRNPVFTEPSVTQPQP |
| | | | PVEANGHILISAPTVTSHPIEEIPLDTFVVSSSD |
| | | | SGPTSSTPVPGTAPRPRVGLYSRALHQVQVTDPA |
| | | | FLSTPQRLITYDNPVYEGEDVSVQFSHDSIHNAP |
| | | | DEAFMDIIRLHRPAIASRRGLVRYSRIGQRGSMH |
| | | | TRSGKHIGARIHYFYDISPIAQAAEEIEMHPLVA |
| | | | AQDDTFDIYAESFEPGINPTQHPVTNISDTYLTS |
| | | | TPNTVTQPWGNTTVPLSLPNDLFLQSGPDITFPT |
| | | | APMGTPFSPVTPALPTGPVFITGSGFYLHPAWYF |
| | | | ARKRRKRIPLFFSDVAA |
| HPV11 | | | MADDSGTENEGSGCTGWFMVEAIVEHTTGTQISE |
| E1 | | | DEEEEVEDSGYDMVDFIDDRHITQNSVEAQALFN |
| | | | RQEADAHYATVQDLKRKYLGSPYVSPISNVANAV |
| | | | ESEISPRLDAIKLTTQPKKVKRRLFETRELTDSG |
| | | | YGYSEVEAATQVEKHGDPENGGDGQERDTGRDIE |
| | | | GEGVEHREAEAVDDSTREHADTSGILELLKCKDI |
| | | | RSTLHGKFKDCFGLSFVDLIRPFKSDRTTCADWV |
| | | | VAGFGIHHSIADAFQKLIEPLSLYAHIQWLTNAW |
| | | | GMVLLVLIRFKVNKSRCTVARTLGTLLNIPENHM |
| | | | LIEPPKIQSGVRALYWFRTGISNASTVIGEAPEW |
| | | | ITRQTVIEHSLADSQFKLTEMVQWAYDNDICEES |
| | | | EIAFEYAQRGDFDSNARAFLNSNMQAKYVKDCAI |
| | | | MCRHYKHAEMKKMSIKQWIKYRGTKVDSVGNWKP |
| | | | IVQFLRHQNIEFIPFLSKLKLWLHGTPKKNCIAI |
| | | | VGPPDTGKSCFCMSLIKFLGGTVISYVNSCSHFW |
| | | | LQPLTDAKVALLDDATQPCWTYMDTYMRNLLDGN |
| | | | PMSIDRKHRALTLIKCPPLLVTSNIDISKEEKYK |
| | | | YLHSRVTTFTFPNPFPFDRNGNAVYELSDANWKC |
| | | | FFERLSSSLDIEDSEDEEDGSNSQAFRCVPGSVV |
| | | | RTL |
| HPV11 | | | MEAIAKRLDACQDQLLELYEENSIDIHKHIMHWK |
| E2 | | | CIRLESVLLHKAKQMGLSHIGLQVVPPLTVSETK |
| | | | GHNAIEMQMHLESLAKTQYGVEPWTLQDTSYEMW |
| | | | LTPPKRCFKKQGNTVEVKFDGCEDNVMEYVVWTH |
| | | | IYLQDNDSWVKVTSSVDAKGIYYTCGQFKTYYVN |
| | | | FNKEAQKYGSTNHWEVCYGSTVICSPASVSSTVR |
| | | | EVSIAEPTTYTPAQTTAPTVSACTTEDGVSAPPR |
| | | | KRARGPSTNNTLCVANIRSVDSTINNIVTDNYNK |
| | | | HQRRNNCHSAATPIVQLQGDSNCLKCFRYRLNDK |
| | | | YKHLFELASSTWHWASPEAPHKNAIVTLTYSSEE |
| | | | QRQQFLNSVKIPPTIRHKVGFMSLHLL |
| HPV11 | | | MVVPIIGKYVMAAQLYVLLHLYLALYEKYPLLNL |
| E4 | | | LHTPPHRPPPLQCPPAPRKTACRRRLGSEHVDRP |
| | | | LTTPCVWPTSDPWTVQSTTSSLTITTSTKEGTTV |
| | | | TVQLRL |
| HPV11 | | | MEVVPVQIAAATTTTLILPVVIAFAVCILSIVLI |
| E5A | | | ILISDFVVYTSVLVLTLLLYLLLWLLLTTPLQFF |
| | | | LLTLCVCYFPAFYIHIYIVQTQQ |
| HPV11 | | | MVMLTCHLNDGDTWLFLWLFTAFVVAVLGLLLL |
| E5B | | | HYRAVHGTEKTKCAKCKSNRNITVDYVYMSHGD |
| | | | NGDYVYMN |
| HPV11 | | | MESKDASTSATSIDQLCKTFNLSLHTLQIQCVFC |
| E6 | | | RNALTTAEIYAYAYKNLKVVWRDNFPFAACACCL |
| | | | ELQGKINQYRHFNYAAYAPTVEEETNEDILKVLI |
| | | | RCYLCHKPLCEIEKLKHILGKARFIKLNNQWKGR |
| | | | CLHCWTTCMEDLLP |
| HPV11 | | | MHGRLVTLKDIVLDLQPPDPVGLHCYEQLEDSSE |
| E7 | | | DEVDKVDKQDAQPLTQHYQILTCCCGCDSNVRLV |
| | | | VECTDGDIRQLQDLLLGTLNIVCPICAPKP |
| HPV11 | | | MWRPSDSTVYVPPPNPVSKVVATDAYVKRTNIFY |
| L1 | | | HASSSRLLAVGHPYYSIKKVNKTVVPKVSGYQYR |
| | | | VFKVVLPDPNKFALPDSSLFDPTTQRLVWACTGL |
| | | | EVGRGQPLGVGVSGHPLLNKYDDVENSGGYGGNP |
| | | | GQDNRVNVGMDYKQTQLCMVGCAPPLGEHWGK |
| | | | GTQCSNTSVQNGDCPPLELITSVIQDGDMVDTGF |
| | | | GAMNFADLQTNKSDVPLDICGTVCKYPDYLQMAA |
| | | | DPYGDRLFFYLRKEQMFARHFFNRAGTVGEPVPD |
| | | | DLLVKGGNNRSSVASSIYVHTPSGSLVSSEAQLF |
| | | | NKPYWLQKAQGHNNGICWGNHLFVTVVDTTRSTN |
| | | | MTLCASVSKSATYTNSDYKEYMRHVEEFDLQFIF |
| | | | QLCSITLSAEVMAYIHTMNPSVLEDWNFGLSPPP |
| | | | NGTLEDTYRYVQSQAITCQKPTPEKEKQDPYKDM |
| | | | SFWEVNLKEKFSSELDQFPLGRKFLLQSGYRGRT |
| | | | SARTGIKRPAVSKPSTAPKRKRTKTKK |
| HPV11 | | | MKPRARRRKRASATQLYQTCKATGTCPPDVIPKV |
| L2 | | | EHTTIADQILKWGSLGVFFGGLGIGTGAGSGGRA |
| | | | GYIPLGSSPKPAITGGPAARPPVLVEPVAPSDPS |
| | | | IVSLIEESAIINAGAPEVVPPTQGGFTITSSEST |
| | | | TPAILDVSVTNHTTTSVFQNPLFTEPSVIQPQPP |
| | | | VEASGHILISAPTITSQHVEDIPLDTFVVSSSDS |
| | | | GPTSSTPLPRAFPRPRVGLYSRALQQVQVTDPAF |
| | | | LSTPQRLVTYDNPVYEGEDVSLQFTHESIHNAPD |
| | | | EAFMDIIRLHRPAITSRRGLVRFSRIGQRGSMYT |
| | | | RSGQHIGARIHYFQDISPVTQAAEEIELHPLVAA |
| | | | ENDTFDIYAEPFDPIPDPVQHSVTQSYLTSTPNT |
| | | | LSQSWGNTTVPLSIPSDWFVQSGPDITFPTASMG |
| | | | TPFSPVTPALPTGPVFITGSDFYLHPTWYFARRR |
| | | | RKRIPLFFTDVAA |
| HPV16 | | | MADPAGTNGEEGTGCNGWFYVEAVVEKKTGDAI |
| E1 | | | SDDENENDSDTGEDLVDFIVNDNDYLTQAETETA |
| | | | HALFTAQEAKQHRDAVQVLKRKYLVSPLSDISGC |
| | | | VDNNISPRLKAICIEKQSRAAKRRLFESEDSGYG |
| | | | NTEVETQQMLQVEGRHETETPCSQYSGGSGGGCS |
| | | | QYSSGSGGEGVSERHTICQTPLTNILNVLKTSNA |
| | | | KAAMLAKFKELYGVSFSELVRPFKSNKSTCCDWC |
| | | | IAAFGLTPSIADSIKTLLQQYCLYLHIQSLACSW |
| | | | GMVVLLLVRYKCGKNRETIEKLLSKLLCVSPMCM |
| | | | MIEPPKLRSTAAALYWYKTGISNISEVYGDTPEW |
| | | | IQRQTVLQHSFNDCTFELSQMVQWAYDNDIVDDS |
| | | | EIAYKYAQLADTNSNASAFLKSNSQAKIVKDCAT |
| | | | MCRHYKRAEKKQMSMSQWIKYRCDRVDDGGDWKQ |
| | | | IVMFLRYQGVEFMSFLTALKRFLQGIPKKNCILL |
| | | | YGAANTGKSLFGMSLMKFLQGSVICFVNSKSHFW |
| | | | LQPLADAKIGMLDDATVPCWNYIDDNLRNALDGN |
| | | | LVSMDVKHRPLVQLKCPPLLITSNINAGTDSRWP |
| | | | YLHNRLVVFTFPNEFPFDENGNPVYELNDKNWKS |
| | | | FFSRTWSRLSLHEDEDKENDGDSLPTFKCVSGQN |
| | | | TNTL |
| HPV16 | W2WLHS | | METLCQRLNVCQDKILTHYENDSTDLRDHIDYWK |
| E2 | | | HMRLECAIYYKAREMGFKHINHQVVPTLAVSKNK |
| | | | ALQAIELQLTLETIYNSQYSNEKWTLQDVSLEVY |
| | | | LTAPTGCIKKHGYTVEVQFDGDICNTMHYTNWTH |
| | | | IYICEEASVTVVEGQVDYYGLYYVHEGIRTYFVQ |
| | | | FKDDAEKYSKNKVWEVHAGGQVILCPTSVFSSNE |
| | | | VSSPEIIRQHLANHPAATHTKAVALGTEETQTTI |
| | | | QRPRSEPDTGNPCHTTKLLHRDSVDSAPILTAFN |
| | | | SSHKGRINCNSNTTPIVHLKGDANTLKCLRYRFK |
| | | | KHCTLYTAVSSTWHWTGHNVKHKSAIVTLTYDSE |
| | | | WQRDQFLSQVKIPKTITVSTGFMSI |
| HPV16 | W5WLHS | | MTNLDTASTTLLACFLLCFCVLLCVCLLIRPLLL |
| E5 | | | SVSTYTSLIILVLLLWITAASAFRCFIVYIIFVY |
| | | | IPLFLIHTHARFLIT |
| HPV16 | | | MHQKRTAMFQDPQERPRKLPQLCTELQTTIHDII |
| E6 | | | LECVYCKQQLLRREVYDFAFRDLCIVYRDGNPYA |
| | | | VCDKCLKFYSKISEYRHYCYSLYGTTLEQQYNKP |
| | | | LCDLLIRCINCQKPLCPEEKQRHLDKKQRFHNIR |
| | | | GRWTGRCMSCCRSSRTRRETQL |
| HPV16 | | | MHGDTPTLHEYMLDLQPETTDLYCYEQLNDSSEE |
| E7 | | | EDEIDGPAGQAEPDRAHYNIVTFCCKCDSTLRLC |
| | | | VQSTHVDIRTLEDLLMGTLGIVCPICSQKP |
| HPV16 | AAD | | MQVTFIYILVITCYENDVNVYHIFFQMSLWLPSE |
| L1 | 33259 | | ATVYLPPVPVSKVVSTDEYVARTNIYYHAGTSRL |
| | | | LAVGHPYFPIKKPNNNKILVPKVSGLQYRVFRIH |
| | | | LPDPNKFGFPDTSFYNPDTQRLVWACVGVEVGRG |
| | | | QPLGVGISGHPLLNKLDDTENASAYAANAGVDNR |
| | | | ECISMDYKQTQLCLIGCKPPIGEHWGKGSPCTNV |
| | | | AVNPGDCPPLELINTVIQDGDMVDTGFGAMDFTT |
| | | | LQANKSEVPLDICTSICKYPDYIKMVSEPYGDSL |
| | | | FFYLRREQMFVRHLFNRAGAVGENVPDDLYIKGS |
| | | | GSTANLASSNYFPTPSGSMVTSDAQIFNKPYWLQ |
| | | | RAQGHNNGICWGNQLFVTVVDTTRSTNMSLCAAI |
| | | | STSETTYKNTNFKEYLRHGEEYDLQFIFQLCKIT |
| | | | LTADVMTYIHSMNSTILEDWNFGLQPPPGGTLED |
| | | | TYRFVTSQAIACQKHTPPAPKEDPLKKYTFWEVN |
| | | | LKEKFSADLDQFPLGRKFLLQAGLKAKPKFTLGK |
| | | | RKATPTTSSTSTTAKRKKRKL |
| HPV16 | AAD | | MRHKRSAKRTKRASATQLYKTCKQAGTCPPDIII |
| L2 | 33258 | | PKVEGKTIADQILQYGSMGVFFGGLGIGTGSGTG |
| | | | GRTGYIPLGTRPPTATDTLAPVRPPLTVDPVGPS |
| | | | DPSIVSLVEETSFIDAGAPTSVPSIPPDVSGFSI |
| | | | TTSTDTTPAILDINNTVTTVTTHNNPTFTDPSVL |
| | | | QPPTPAETGGHFTLSSSTISTHNYEEIPMDTFIV |
| | | | STNPNTVTSSTPIPGSRPVARLGLYSRTTQQVKV |
| | | | VDPAFITTPTKLITYDNPAYEGIDVDNTLYFSSN |
| | | | DNSINIAPDPDFLDIVALHRPALTSRRTGIRYSR |
| | | | IGNKQTLRTRSGKSIGAKVHYYYDFSTIDSAEEI |
| | | | ELQTITPSTYTTTSHAALPTSINNGLYDIYADDF |
| | | | ITDTSTTPVPSVPSTSLSGYIPANTTIPFGGAYN |
| | | | IPLVSGPDIPINITDQAPSLIPIVPGSPQYTIIA |
| | | | DAGDFYLHPSYYMLRKRRKRLPYFFSDVSLAA |
| HPV18 | | | MADPEGTDGEGTGCNGWFYVQAIVDKKTGDVISD |
| E1 | | | DEDENATDTGSDMVDFIDTQGTFCEQAELETAQA |
| | | | LFHAQEVHNDAQVLHVLKRKFAGGSTENSPLGER |
| | | | LEVDTELSPRLQEISLNSGQKKAKRRLFTISDSG |
| | | | YGCSEVEATQIQVTTNGEHGGNVCSGGSTEAIDN |
| | | | GGTEGNNSSVDGTSDNSNIENVNPQCTIAQLKDL |
| | | | LKVNNKQGAMLAVFKDTYGLSFTDLVRNFKSDKT |
| | | | TCTDWVTAIFGVNPTIAEGFKTLIQPFILYAHIQ |
| | | | CLDCKWGVLILALLRYKCGKSRLTVAKGLSTLLH |
| | | | VPETCMLIQPPKLRSSVAALYWYRTGISNISEVM |
| | | | GDTPEWIQRLTIIQHGIDDSNFDLSEMVQWAFDN |
| | | | ELTDESDMAFEYALLADSNSNAAAFLKSNCQAKY |
| | | | LKDCATMCKHYRRAQKRQMNMSQWIRFRCSKIDE |
| | | | GGDWRPIVQFLRYQQIEFITFLGALKSFLKGTPK |
| | | | KNCLVFCGPANTGKSYFGMSFIHFIQGAVISFVN |
| | | | STSHFWLEPLTDTKVAMLDDATTTCWTYFDTYMR |
| | | | NALDGNPISIDRKHKPLIQLKCPPILLTTNIHPA |
| | | | KDNRWPYLESRITVFEFPNAFPFDKNGNPVYEIN |
| | | | DKNWKCFFERTWSRLDLHEEEEDADTEGNPFGTF |
| | | | KLRAGQNHRPL |
| HPV18 | W2WL18 | | MQTPKETLSERLSCVQDKIIDHYENDSKDIDSQI |
| E2 | | | QYWQLIRWENAIFFAAREHGIQTLNHQVVPAYNI |
| | | | SKSKAHKAIELQMALQGLAQSRYKTEDWTLQDTC |
| | | | EELWNTEPTHCFKKGGQTVQVYFDGNKDNCMTYV |
| | | | AWDSVYYMTDAGTWDKTATCVSHRGLYYVKEGY |
| | | | NTFYIEFKSECEKYGNTGTWEVHFGNNVIDCNDS |
| | | | MCSTSDDTVSATQLVKQLQHTPSPYSSTVSVGTA |
| | | | KTYGQTSAATRPGHCGLAEKQHCGPVNPLLGAAT |
| | | | PTGNNKRRKLCSGNTTPIIHLKGDRNSLKCLRYR |
| | | | LRKHSDHYRDISSTWHWTGAGNEKTGILTVTYHS |
| | | | ETQRTKFLNTVAIPDSVQILVGYMTM |
| HPV18 | W5WL18 | | MLSLIFLFCFCVCMYVCCHVPLLPSVCMCAYAWV |
| E5 | | | LVFVYIVVITSPATAFTVYVFCFLLPMLLLHIHA |
| | | | ILSLQ |
| HPV18 | | | MARFEDPTRRPYKLPDLCTELNTSLQDIEITCVY |
| E6 | | | CKTVLELTEVFEFAFKDLFVVYRDSIPHAACHKC |
| | | | IDFYSRIRELRHYSDSVYGDTLEKLTNTGLYNLL |
| | | | IRCLRCQKPLNPAEKLRHLNEKRRFHNIAGHYRG |
| | | | QCHSCCNRARQERLQRRRETQV |
| HPV18 | | | MHGPKATLQDIVLHLEPQNEIPVDLLCHEQLSDS |
| E7 | | | EEENDEIDGVNHQHLPARRAEPQRHTMLCMCCKC |
| | | | EARIKLVVESSADDLRAFQQLFLNTLSFVCPWCA |
| | | | SQQ |
| HPV18 | CAA | | MCLYTRVLILHYHLLPLYGPLYHPRPLPLHSILV |
| L1 | 28671 | | YMVHIIICGHYIILFLRNVNVFPIFLQMALWRPS |
| | | | DNTVYLPPPSVARVVNTDDYVTPTSIFYHAGSSR |
| | | | LLTVGNPYFRVPAGGGNKQDIPKVSAYQYRVFRV |
| | | | QLPDPNKFGLPDTSIYNPETQRLVWACAGVEIGR |
| | | | GQPLGVGLSGHPFYNKLDDTESSHAATSNVSEDV |
| | | | RDNVSVDYKQTQLCILGCAPAIGEHWAKGTACKS |
| | | | RPLSQGDCPPLELKNTVLEDGDMVDTGYGAMDFS |
| | | | TLQDTKCEVPLDICQSICKYPDYLQMSADPYGDS |
| | | | MFFCLRREQLFARHFWNRAGTMGDTVPQSLYIKG |
| | | | TGMPASPGSCVYSPSPSGSIVTSDSQLFNKPYWL |
| | | | HKAQGHNNGVCWHNQLFVTVVDTTPSTNLTICAS |
| | | | TQSPVPGQYDATKFKQYSRHVEEYDLQFIFQLCT |
| | | | ITLTADVMSYIHSMNSSILEDWNFGVPPPPTTSL |
| | | | VDTYRFVQSVAITCQKDAAPAENKDPYDKLKFWN |
| | | | VDLKEKFSLDLDQYPLGRKFLVQAGLRRKPTIGP |
| | | | RKRSAPSATTSSKPAKRVRVRARK |
| HPV18 | P2WL18 | | MVSHRAARRKRASVTDLYKTCKQSGTCPPDVVPK |
| L2 | | | VEGTTLADKILQWSSLGIFLGGLGIGTGSGTGGR |
| | | | TGYIPLGGRSNTVVDVGPTRPPVVIEPVGPTDPS |
| | | | IVTLIEDSSVVTSGAPRPTFTGTSGFDITSAGTT |
| | | | TPAVLDITPSSTSVSISTTNFTNPAFSDPSIIEV |
| | | | PQTGEVAGNVFVGTPTSGTHGYEEIPLQTFASSG |
| | | | TGEEPISSTPLPTVRRVAGPRLYSRAYQQVSVAN |
| | | | PEFLTRPSSLITYDNPAFEPVDTTLTFDPRSDVP |
| | | | DSDFMDIIRLHRPALTSRRGTVRFSRLGQRATMF |
| | | | TRSGTQIGARVHFYHDISPIAPSPEYIELQPLVS |
| | | | ATEDNDLFDIYADDMDPAVPVPSRSTTSFAFFKY |
| | | | SPTISSASSYSNVTVPLTSSWDVPVYTGPDITLP |
| | | | STTSVWPIVSPTAPASTQYIGHGTHYYLWPLYYF |
| | | | IPKKRKRVPYFFADGFVAA |
| HPV31 | W1WL31 | | MADPAGTDGEGTGCNGWFYVEAVIDRQTGDNISE |
| E1 | | | DENEDSSDTGEDMVDFIDNCNVYNNQAEAETAQA |
| | | | LFHAQEAEEHAEAVQVLKRKYVGSPLSDISSCVD |
| | | | YNISPRLKAICIENNSKTAKRRLFELPDSGYGNT |
| | | | EVETQQMVQVEEQQTTLSCNGSDGTHSERENETP |
| | | | TRNILQVLKTSNGKAAMLGKFKELYGVSFMELIR |
| | | | PFQSNKSTCTDWCVAAFGVTGTVAEGFKTLLQPY |
| | | | CLYCHLQSLACSWGMVMLMLVRFKCAKNRITIEK |
| | | | LLEKLLCISTNCMLIQPPKLRSTAAALYWYRTGM |
| | | | SNISDVYGETPEWIERQTVLQHSFNDTTFDLSQM |
| | | | VQWAYDNDVMDDSEIAYKYAQLADSDSNACAFLK |
| | | | SNSQAKIVKDCGTMCRHYKRAEKRQMSMGQWIKS |
| | | | RCDKVSDEGDWRDIVKFLRYQQIEFVSFLSALKL |
| | | | FLKGVPKKNCILIHGAPNTGKSYFGMSLISFLQG |
| | | | CIISYANSKSHFWLQPLADAKIGMLDDATTPCWH |
| | | | YIDNYLRNALDGNPVSIDVKHKALMQLKCPPLLI |
| | | | TSNINAGKDDRWPYLHSRLVVFTFPNPFPFDKNG |
| | | | NPVYELSDKNWKSFFSRTWCRLNLHEEEDKENDG |
| | | | DSFSTFKCVSGQNIRTL |
| HPV31 | W2WL31 | | METLSQRLNVCQDKILEHYENDSKRLCDHIDYWK |
| E2 | | | HIRLECVLMYKAREMGIHSINHQVVPALSVSKAK |
| | | | ALQAIELQMMLETLNNTEYKNEDWTMQQTSLELY |
| | | | LTAPTGCLKKHGYTVEVQFDGDVHNTMHYTNWKF |
| | | | IYLCIDGQCTVVEGQVNCKGIYYVHEGHITYFVN |
| | | | FTEEAKKYGTGKKWEVHAGGQVIVFPESVFSSDE |
| | | | ISFAGIVTKLPTANNTTTSNSKTCALGTSEGVRR |
| | | | ATTSTKRPRTEPEHRNTHHPNKLLRGDSVDSVNC |
| | | | GVISAAACTNQTRAVSCPATTPIIHLKGDANILK |
| | | | CLRYRLSKYKQLYEQVSSTWHWTCTDGKHKNAIV |
| | | | TLTYISTSQRDDFLNTVKIPNTVSVSTGYMTI |
| HPV31 | W5WL31 | | MIELNISTVSIVLCFLLCFCVLLFVCLVIRPLVL |
| E5 | | | SVSVYATLLLLIVILWVIATSPLRCFCIYVVFIY |
| | | | LPLFVIHTHASFLSQQ |
| HPV31 | W6WL31 | | MFKNPAERPRKLHELSSALEIPYDELRLNCVYCK |
| E6 | | | GQLTETEVLDFAFTDLTIVYRDDTPHGVCTKCLR |
| | | | FYSKVSEFRWYRYSVYGTYLEKLTNKGICDLLIR |
| | | | CITCQRPLCPEEKQRHLDKKKRFHNIGGRWTGRC |
| | | | IACWRRPRTETQV |
| HPV31 | W7WL31 | | MRGETPTLQDYVLDLQPEATDLHCYEQLPDSSDE |
| E7 | | | EDVIDSPAGQAEPDTSNYNIVTFCCQCKSTLRLC |
| | | | VQSTQVDIRILQELLMGSFGIVCPNCSTRL |
| HPV31 | P1WL31 | | MSLWRPSEATVYLPPVPVSKVVSTDEYVTRTNIY |
| L1 | | | YHAGSARLLTVGHPYYSIPKSDNPKKIVVPKVSG |
| | | | LQYRVFRVRLPDPNKFGFPDTSFYNPETQRLVWA |
| | | | CVGLEVGRGQPLGVGISGHPLLNKFDDTENSNRY |
| | | | AGGPGTDNRECISMDYKQTQLCLLGCKPPIGEHW |
| | | | GKGSPCSNNAITPGDCPPLELKNSVIQDGDMVDT |
| | | | GFGAMDFTALQDTKSNVPLDICNSICKYPDYLKM |
| | | | VAEPYGDTLFFYLRREQMFVRHFFNRSGTVGESV |
| | | | PTDLYIKGSGSTATLANSTYFPTPSGSMVTSDAQ |
| | | | IFNKPYWMQRAQGHNNGICWGNQLFVTVVDTTRS |
| | | | TNMSVCAAIANSDTTFKSSNFKEYLRHGEEFDLQ |
| | | | FIFQLCKITLSADIMTYIHSMNPAILEDWNIFGL |
| | | | TTPPSGSLEDTYRFVTSQAITCQKTAPQKPKEDP |
| | | | FKDYVFWEVNLKEKFSADLDQFPLGRKFLLQAGY |
| | | | RARPKEKAGKRSAPSASTTTPAKRKKTKK |
| HPV31 | P2WL31 | | MRSKRSTKRTKRASATQLYQTCKAAGTCPSDVIP |
| L2 | | | KIEHTTIADQILRYGSMGVFFGGLGIGSGSGTGG |
| | | | RTGYVPLSTRPSTVSEASIPIRPPVSIDPVGPLD |
| | | | PSIVSLVEESGIVDVGAPAPIPHPPTTSGFDIAT |
| | | | TADTTPAILDVTSVSTHENPTFTDPSVLQPPTPA |
| | | | ETSGHLLLSSSSISTHNYEEIPNDTFIVSTNNEN |
| | | | ITSSTPIPGVRRPARLGLYSKATQQVKVIDPTFL |
| | | | SAPKQLITYENPAYETVNAEESLYFSNTSHNIAP |
| | | | DPDFLDIIALHRPALTSRRNTVRYSRLGNKQTLR |
| | | | TRSGATIGARVHYYYDISSINPAGESIEMQPLGA |
| | | | SATTTSTLNDGLYDIYADTDFTVDTPATHNVSPS |
| | | | TAVQSTSAVSAYVPTNTTVPLSTGFDIPIFSGPD |
| | | | VPIEHAPTQVFPFPLAPTTPQVSIFVDGGDFYLH |
| | | | PSYYMLKRRRKRVSYFFTDVSVAA |
| HPV33 | W1WL33 | | MADPEGTNGAGMGCTGWFEVEAVIERRTGDNISE |
| E1 | | | DEDETADDSGTDLLEFIDDSMENSIQADTEAARA |
| | | | LFNIQEGEDDLNAVCALKRKFAACSQSAAEDVVD |
| | | | RAANPCRTSINKNKECTYRKRKIDELEDSGYGNT |
| | | | EVETQQMVQQVESQNGDTNLNDLESSGVGDDSEV |
| | | | SCETNVDSCENVTLQEISNVLHSSNTKANILYKF |
| | | | KEAYGISFMELVRPFKSDKTSCTDWCITGYGISP |
| | | | SVAESLKVLIKQHSLYTHLQCLTCDRGIIILLLI |
| | | | RFRCSKNRLTVAKLMSNLLSIPETCMVIEPPKLR |
| | | | SQTCALYWFRTAMSNISDVQGTTPEWIDRLTVLQ |
| | | | HSFNPNIFDLSEMVQWAYDNELTDDSDIAYYYAQ |
| | | | LADSNSNAAAFLKSNSQAKIVKDCGIMCRHYKKA |
| | | | EKRKMSIGQWIQSRCEKTNDGGNWRPIVQLLRYQ |
| | | | NIEFTAFLGAFKKFLKGIPKKSCMLICGPANTGK |
| | | | SYFGMSLIQFLKGCVISCVNSKSHFWLQPLSDAK |
| | | | IGMIDDVTPISWTYIDDYMRNALDGNEISIDVKH |
| | | | RALVQLKCPPLLLTSNTNAGTDSRWPYLHSRLTV |
| | | | FEFKNPFPFDENGNPVYAINDENWKSFFSRTWCK |
| | | | LDLIEEEDKENHGGNISTFKCSAGENTRSLRS |
| HPV33 | W2WL33 | | MEEISARLNAVQEKILDLYEADKTDLPSQIEHWK |
| E2 | | | LIRMECALLYTAKQMGFSHLCHQVVPSLLASKTK |
| | | | AFQVIELQMALETLSKSQYSTSQWTLQQTSLEVW |
| | | | LCEPPKCFKKQGETVTVQYDNDKKNTMDYTNWGE |
| | | | IYIIEEDTCTMVTGKVDYIGMYYIHNCEKVYFKY |
| | | | FKEDAAKYSKTQMWEVHVGGQVIVCPTSISSNQI |
| | | | STTETADIQTDNDNRPPQAAAKRRRPADTTDTAQ |
| | | | PLTKLFCADPALDNRTARTATNCTNKQRTVCSSN |
| | | | VAPIVHLKGESNSLKCLRYRLKPYKELYSSMSST |
| | | | WHWTSDNKNSKNGIVTVTFVTEQQQQMFLGTVKI |
| | | | PPTVQISTGFMTL |
| HPV33 | W5WL33 | | MIFVFVLCFILFLCLSLLLRPLILSISTYAWLLV |
| E5 | | | LVLLLWVFVGSPLKIFFCYLLFLYLPMMCINFHA |
| | | | QHMTQQE |
| HPV33 | W6WL33 | | MFQDTEEKPRTLHDLCQALETTIHNIELQCVECK |
| E6 | | | KPLQRSEVYDFAFADLTVVYREGNPFGICKLCLR |
| | | | FLSKISEYRHYNYSVYGNTLEQTVKKPLNEILIR |
| | | | CIICQRPLCPQEKKRHVDLNKRFHNISGRWAGRC |
| | | | AACWRSRRRETAL |
| HPV33 | W7WL33 | | MRGHKPTLKEYVLDLYPEPTDLYCYEQLSDSSDE |
| E7 | | | DEGLDRPDGQAQPATADYYIVTCCHTCNTTVRLC |
| | | | VNSTASDLRTIQQLLMGTVNIVCPTCAQQ |
| HPV33 | P1WL33 | | MSVWRPSEATVYLPPVPVSKVVSTDEYVSRTSIY |
| L1 | | | YYAGSSRLLAVGHPYFSIKNPTNAKKLLVPKVSG |
| | | | LQYRVFRVRLPDPNKFGFPDTSFYNPDTQRLVWA |
| | | | CVGLEIGRGQPLGVGISGHPLLNKFDDTETGNKY |
| | | | PGQPGADNRECLSMDYKQTQLCLLGCKPPTGEHW |
| | | | GKGVACTNAAPANDCPPLELINTIIEDGDMVDTG |
| | | | FGCMDFKTLQANKSDVPIDICGSTCKYPDYLKMT |
| | | | SEPYGDSLFFFLRREQMFVRHFFNRAGTLGEAVP |
| | | | DDLYIKGSGTTASIQSSAFFPTPSGSMVTSESQL |
| | | | FNKPYWLQRAQGHNNGICWGNQVFVTVVDTTRST |
| | | | NMTLCTQVTSDSTYKNENFKEYIRHVEEYDLQFV |
| | | | FQLCKVTLTAEVMTYIHAMNPDILEDWQFGLTPP |
| | | | PSASLQDTYRFVTSQAITCQKTVPPKEKEDPLGK |
| | | | YTFWEVDLKEKFSADLDQFPLGRKFLLQAGLKAK |
| | | | PKLKRAAPTSTRTSSAKRKKVKK |
| HPV33 | P2WL33 | | MRHKRSTRRKRASATQLYQTCKATGTCPPDVIPK |
| L2 | | | VEGSTIADQILKYGSLGVFFGGLGIGTGSGSGGR |
| | | | TGYVPIGTDPPTAAIPLQPIRPPVTVDTVGPLDS |
| | | | SIVSLIEETSFIEAGAPAPSIPTPSGFDVTTSAD |
| | | | TTPAIINVSSVGESSIQTISTHLNPTFEPSVLHP |
| | | | PAPAEASGHFIFSSPTVSTQSYENIPMDTFVVST |
| | | | DSSNVTSSTPIPGSRPVARLGLYSRNTQQVKVVD |
| | | | PAFLTSPHKLITYDNPAFESFDPEDTLQFQHSDI |
| | | | SPAPDPDFLDIIALHRPAITSRRHTVRFSRVGQK |
| | | | ATLKTRSGKQIGARIHYYQDLSPIVPLDHTVPNE |
| | | | QYELQPLHDTSTSSYSINDGLYDVYADDVDNVHT |
| | | | PMQHSYSTFATTRTSNVSIPLNTGFDTPVMSGPD |
| | | | IPSPLFPTSSPFVPISPFFPFDTIVVDGADFVLH |
| | | | PSYFILRRRRKRFPYFFTDVRVAA |
| HPV45 | S36563 | | MADPEGTDGEGTGCNGWFFVETIVEKKTGDVISD |
| E1 | | | DEDETATDTGSDMVDFIDTQLSICEQAEQETAQA |
| | | | LFHAQEVQNDAQVLHLLKRKFAGGSKENSPLGEQ |
| | | | LSVDTDLSPRLQEISLNSGHKKAKRRLFTISDSG |
| | | | YGCSEVEAAETQVTVNTNAENGGSVHSTQSSGGD |
| | | | SSDNAENVDPHCSITELKELLQASNKKAAMLAVF |
| | | | KDIYGLSFTDLVRNFKSDKTTCTDWVMAIFGVNP |
| | | | TVAEGFKTLIKPATLYAHIQCLDCKWGVLILALL |
| | | | RYKCGKNRLTVAKGLSTLLHVPETCMLIEPPKLR |
| | | | SSVAALYWYRTGISNISEVSGDTPEWIQRLTIIQ |
| | | | HGIDDSNFDLSDMVQWAFDNDLTDESDMAFQYAQ |
| | | | LADCNSNAAAFLKSNCQAKYLKDCAVMCRHYKRA |
| | | | QKRQMNMSQWIKYRCSKIDEGGDWRPIVQFLRYQ |
| | | | GVEFISFLRALKEFLKGTPKKNCILLYGPANTGK |
| | | | SYFGMSFIHFLQGAIISFVNSNSHFWLEPLADTK |
| | | | VAMLDDATHTCWTYFDNYMRNALDGNPISIDRKH |
| | | | KPLLQLKCPPILLTSNIDPAKDNKWPYLESRVTV |
| | | | FTFPHAFPFDKNGNPVYEINDKNWKCFFERTWSR |
| | | | LDLHEDDEDADTEGIPFGTFKCVTGQNTRPL |
| HPV45 | S36564 | | MKMQTPKESLSERLSALQDKILDHYENDSKDINS |
| E2 | | | QISYWQLIRLENAILFTAREHGITKLNHQVVPPI |
| | | | NISKSKAHKAIELQMALKGLAQSKYNNEEWTLQD |
| | | | TCEELWNTEPSQCFKKGGKTVHVYFDGNKDNCMN |
| | | | YVVWDSIYYITETGIWDKTAACVSYWGVYYIKDG |
| | | | DTTYYVQFKSECEKYGNSNTWEVQYGGNVIDCND |
| | | | SMCSTSDDTVSATQIVRQLQHASTSTPKTASVGT |
| | | | PKPHIQTPATKRPRQCGLTEQHHGRVNTHVHNPL |
| | | | LCSSTSNNKRRKVCSGNTTPIIHLKGDKNSLKCL |
| | | | RYRLRKYADHYSEISSTWHWTGCNKNTGILTVTY |
| | | | NSEVQRNTFLDVVTIPNSVQISVGYMTI |
| HPV45 | CAB | | MARFDDPTQRPYKLPDLCTELNTSLQDVSIACVY |
| E6 | 44706 | | CKATLERTEVYQFAFKDLFIVYRDCIAYAACHKC |
| | | | IDFYSRIRELRYYSNSVYGETLEKITNTELYNLL |
| | | | IRCLRCQKPLNPAEKRRHLKDKRRFHSIAGQYRG |
| | | | QCNTCCDQARQERLRRRRETQV |
| HPV45 | CAB | | MHGPRATLQEIVLHLEPQNELDPVDLLCYEQLSE |
| E7 | 44707 | | SEEENDEADGVSHAQLPARRAEPQRHKILCVCCK |
| | | | CDGRIELTVESSADDLRTLQQLFLSTLSFVCPWC |
| | | | ATNQ |
| HPV45 | CAB | | MAHNIIYGHGIIIFLKNVNVFPIFLQMALWRPSD |
| L1 | 44705 | | STVYLPPPSVARVVNTDDYVSRTSIFYHAGSSRL |
| | | | LTVGNPYFRVVPSGAGNKQAVPKVSAYQYRVFRV |
| | | | ALPDPNKFGLPDSTIYNPETQRLVWACVGMEIGR |
| | | | GQPLGIGLSGHPFYNKLDDTESAHAATAVITQDV |
| | | | RDNVSVDYKQTQLCILGCVPAIGEHWAKGTLCKP |
| | | | AQLQPGDCPPLELKNTIIEDGDMVDTGYGAMDFS |
| | | | TLQDTKCEVPLDICQSICKYPDYLQMSADPYGDS |
| | | | MFFCLRREQLFARHFWNRAGVMGDTVPTDLYIKG |
| | | | TSANMRETPGSCVYSPSPSGSITTSDSQLFNKPY |
| | | | WLHKAQGHNNGICWHNQLFVTVVDTTRSTNLTLC |
| | | | ASTQNPVPNTYDPTKFKHYSRHVEEYDLQFIFQL |
| | | | CTITLTAEVSYIHSMNSSILENWNFGVPPPPTTS |
| | | | LVDTYRFVQSVAVTCQKDTTPPEKQDPYDKLKFW |
| | | | TVDLKEKFSSDLDQYPLGRKFLVQAGLRRRPTIG |
| | | | PRKRPAASTSTASRPAKRVRIRSKK |
| HPV45 | S36565 | | MVSHRAARRKRASATDLYRTCKQSGTCPPDVINK |
| L2 | | | VEGTTLADKILQWSSLGIFLGGLGIGTGSGSGGR |
| | | | TGYVPLGGRSNTVVDVGPTRPPVVIEPVGPTDPS |
| | | | IVTLVEDSSVVASGAPVPTFTGTSGFEITSSGTT |
| | | | TPAVLDITPTVDSVSISSTSFTNPAFSDPSIIEV |
| | | | PQTGEVSGNIFVGTPTSGSHGYEEIPLQTFASSG |
| | | | SGTEPISSTPLPTVRRVRGPRLYSRANQQVRVST |
| | | | SQFLTHPSSLVTFDNPAYEPLDTTLSFEPTSNVP |
| | | | DSDFMDIIRLHRPALSSRRGTVRFSRLGQRATMF |
| | | | TRSGKQIGGRVHFYHDISPIAATEEIELQPLISA |
| | | | TNDSDLFDVYADFPPPASTTPSTIHKSFTYPKYS |
| | | | LTMPSTAASSYSNVTVPLTSAWDVPIYTGPDIIL |
| | | | PSHTPMWPSTSPTNASTTTYIGIHGTQYYLWPWY |
| | | | YYFPKKRKRIPYFFADGFVAA |
| HPV52 | X74481 | | MEDPEGTEGEREGCTGWFEVEAIIEKQTGDNISE |
| E1 | | | DEDENAYDSGTDLIDFIDDSNINNEQAEHEAARA |
| | | | LFNAQEGEDDLHAVSAVKRKFTSSPESAGQDGVE |
| | | | KHGSPRAKHICVNTECVLPKRKPCHVEDSGYGNS |
| | | | EVEAQQMADQVDGQNGDWQSNSSQSSGVGASNSD |
| | | | VSCTSIEDNEENSNRTLKSIQNIMCENSIKTTVL |
| | | | FKFKETYGVSFMELVRPFKSNRSSCTDWCIIGMG |
| | | | VTPSVAEGLKVLIQPYSIYAHLQCLTCDRGVLIL |
| | | | LLIRFKCGKNRLTVSKLMSQLLNIPETHMVIEPP |
| | | | KLRSATCALYWYRTGLSNISEVYGTTPEWIEQQT |
| | | | VLQHSFDNSIFDFGEMVQWAYDHDITDDSDIAYK |
| | | | YAQLADVNSNAAAFLKSNSQAKIVKDCATMCRHY |
| | | | KRAERKHMNIGQWIQYRCDRIDDGGDWRPIVRFL |
| | | | RYQDIEFTAFLDAFKKFLKGIPKKNCLVLYGPAN |
| | | | TGKSYFGMSLIRFLSGCVISYVNSKSHFWLQPLT |
| | | | DAKVGMIDDVTPICWTYIDDYMRNALDGNDISVD |
| | | | VKHRALVQIKCPPLILTTNTNAGTDPRWPYLHSR |
| | | | LVVFHFKNPFPFDENGNPIYEINNENWKSFFSRT |
| | | | WCKLDLIQEEDKENDGVDTGTFKCSAGKNTRSIR |
| | | | S |
| HPV52 | | | MESIPARLNAVQEKILDLYEADSNDLNAQIEHWK |
| E2 | | | LTRMECVLFYKAKELGITHIGHQVVPPMAVSKAK |
| | | | ACQAIELQLALEALNKTQYSTDGWTLQQTSLEMW |
| | | | RAEPQKYFKKHGYTITVQYDNDKNNTMDYTNWKE |
| | | | IYLLGECECTIVEGQVDYYGLYYWCDGEKIYFVK |
| | | | ESNDAKQYCVTGVWEVHVGGQVIVCPASVSSNEV |
| | | | STTETAVHLCTETSKTSAVSVGAKDTHLQPPQKR |
| | | | RRPDVTDSRNTKYPNNLLRGQQSVDSTTRGLVTA |
| | | | TECTNKGRVAHTTCTAPIIHLKGDPNSLKCLRYR |
| | | | VKTHKSLYVQISSTWHWTSNECTNNKLGIVTITY |
| | | | SDETQRQQFLKTVKIPNTVQVIQGVMSL |
| HPV52 | | | MFEDPATRPRTLHELCEVLEESVHEIRLQCVQCK |
| E6 | | | KELQRREVYKFLFTDLRIVYRDNNPYGVCIMCLR |
| | | | FLSKISEYRHYQYSLYGKTLEERVKKPLSEITIR |
| | | | CIICQTPLCPEEKERHVNANKRFHNIMGRWTGRC |
| | | | SECWRPRPVTQV |
| HPV52 | | | MRGDKATIKDYILDLQPETTDLHCYEQLGDSSDE |
| E7 | | | EDTDGVDRPDGQAEQATSNYYIVTYCHSCDSTLR |
| | | | LCIHSTATDLRTLQQMLLGTLQVVCPGCARL |
| HPV52 | | | MVQILFYILVIFYYVAGVNVFHIFLQMSVWRPSE |
| L1 | | | ATVYLPPVPVSKVVSTDEYVSRTSIYYYAGSSRL |
| | | | LTVGHPYFSIKNTSSGNGKKVLVPKVSGLQYRVF |
| | | | RIKLPDPNKFGFPDTSFYNPETQRLVWACTGLEI |
| | | | GRGQPLGVGISGHPLLNKFDDTETSNKYAGKPGI |
| | | | DNRECLSMDYKQTQLCILGCKPPIGEHWGKGTPC |
| | | | NNNSGNPGDCPPLQLINSVIQDGDMVDTGFGCMD |
| | | | FNTLQASKSDVPDICSSVCKYPDYLQMASEPYGD |
| | | | SLFFFLRREQMFVRHFFNRAGTLGDPVPGDLYIQ |
| | | | GSNSGNTATVQSSAFFPTPSGSMVTSESQLFNKP |
| | | | YWLQRAQGHNNGICWGNQLFVTVVDTTRSTNMTL |
| | | | CAEVKKESTYKNENEKEYLRHGEEFDLQFIFQLC |
| | | | KITLTADVMTYIHKMDATILEDWQFGLTPPPSAS |
| | | | LEDTYRFVTSTAITCQKNTPPKGKEDPLKDYMFW |
| | | | EVDLKEKFSADLDQFPLGRKFLLQAGLQARPKLK |
| | | | RPASSAPRTSTKKKKVKR |
| HPV52 | | | MRYRRSTRHKRASATQLYQTCKASGTCPPDVIPK |
| L2 | | | VEGTTIADQLLKYGSLGVFFGGLGIGTGAGSGGR |
| | | | AGYVPLSTRPPTSSITTSTIRPPVTVEPIGPLEP |
| | | | SIVSMIEETTFIESGAPAPSIPSATGFDVTTSAN |
| | | | NTPAIINVTSIGESSVQSVSTHLNPTFTEPSIIQ |
| | | | PPAPAEASGHVLFSSPTISTHTYEEIPMDTFVTS |
| | | | TDSSSVTSSTPIPGSRPTTRLGLYSRATQQVKVV |
| | | | DPAFMSSPQKLVTYNNPVFEGVDTDETIIFDRSQ |
| | | | LLPAPDPDFLDIIALHRPALTSRRGTVRFSRLGN |
| | | | KATLRTRSGKQIGARVHYYHDISPIQPAEVQEDI |
| | | | ELQPLLPQSVSPYTINDGLYDVYADSLQQPTFHL |
| | | | PSTLSTHNNTFTVPINSGIDFVYQPTMSIESGPD |
| | | | IPLPSLPTHTPFVPIAPTAPSTSIIVDGTDFILH |
| | | | PSYFLLRRRRKRFPYFFTDVRVAA |
| HPV56 | | | |
| E1 | | | |
| HPV56 | S36581 | | MVPCLQVCKAKACSAIEVQIALESLSTTIYNNEE |
| E2 | | | WTLRDTCEELWLTEPKKCFKKEGQHIEVWFDGSK |
| | | | NNCMQYVAWKYIYYNGDCGWQKVCSGVDYRGIY |
| | | | YVHDGHKTYYTDFEQEAKKFGCKNIWEVHMENE |
| | | | SIYCPDSVSSTCRYNVSPVETVNEYNTHKTTTTT |
| | | | STSVGNQDAAVSHRPGKRPRLRESEFDSSRESHA |
| | | | KCVTTHTHISDTDNTDSRSRSINNNNHPGDKTTP |
| | | | VVHLKGEPNRLKCCRYRFQKYKTLFVDVTSTYHW |
| | | | TSTDNKNYSIITIIYKDETQRNSFLSHVKIPVVY |
| | | | RLVWDK |
| HPV56 | W6WL56 | | MEPQFNNPQERPRSLHHLSEVLEIPLIDLRLSCV |
| E6 | | | YCKKELTRAEVYNFACTELKLVYRDDFPYAVCRV |
| | | | CLLFYSKVRKYRYYDYSVYGATLESITKKQLCDL |
| | | | LIRCYRCQSPLTPEEKQLHCDRKRRFHLIAHGWT |
| | | | GSCLGCWRQTSREPRESTV |
| HPV56 | S36580 | | MHGKVPTLQDVVLELTPQTEIDLQCNEQLDSSED |
| E7 | | | EDEDEVDHLQERPQQARQAKQHTCYLIHVPCCEC |
| | | | KFVVQLDIQSTKEDLRVVQQLLMGALTVTCPLCA |
| | | | SSN |
| HPV56 | S38563 | | MMLPMMYIYRDPPLHYGLCIFLDVGAVNVFPIFL |
| L1 | | | QMATWRPSENKVYLPPTPVSKVVATDSYVKRTSI |
| | | | FYHAGSSRLLAVGHPYYSVTKDNTKTNIPKVSAY |
| | | | QYRVFRVRLPDPNKFGLPDTNIYNPDQERLVWAC |
| | | | VGLEVGRGQPLGAGLSGHPLFNRLDDTESSNLAN |
| | | | NNVIEDSRDNISVDGKQTQLCIVGCTPAMGEHWT |
| | | | KGAVCKSTQVTTGDCPPLALINTPIEDGDMIDTG |
| | | | FGAMDFKVLQESKAEVPLDIVQSTCKYPDYLKMS |
| | | | ADAYGDSMWFYLRREQLFARHYFNRAGKVGETIP |
| | | | AELYLKGSNGREPPPSSVYVATPSGSMITSEAQL |
| | | | FNKPYWLQRAQGHNNGICWGNQLFVTVVDTTRST |
| | | | NMTISTATEQLSKYDARKINQYLRHVEEYELQFV |
| | | | FQLCKITLSAEVMAYLHNMNANLLEDWNIGLSPP |
| | | | VATSLEDKYRYVRSTAITCQREQPPTEKQDPLAK |
| | | | YKFWDVNLQDSFSTDLDQFPLGRKFLMQLGTRSK |
| | | | PAVATSKKRSAPTSTSTPAKRKRR |
| HPV56 | S36582 | | MVAHRATRRKRASATQLYKTCKLSGTCPEDVVN |
| L2 | | | KIEQKTWADKILQWGSLFTYFGGLGIGTGTGSGG |
| | | | RAGYVPLGSRPSTIVDVTPARPPIVVESVGPTDP |
| | | | SIVTLVEESSVIESGAGIPNFTGSGGFEITSSST |
| | | | TTPAVLDITPTSSTVHVSSTHITNPLFIDPPVIE |
| | | | APQTGEVSGNILISTPTSGIHSYEEIPMQTFAVH |
| | | | GSGTEPISSTPIPGFRRIAAPRLYRKAFQQVKVT |
| | | | DPAFLDRPATLVSADNPLFEGTDTSLAFSPSGVA |
| | | | PDPDFMNIVALHRPAFTTRRGGVRFSRLGRKATI |
| | | | QTRRGTQIGARVHYYYDISPIAQAEEIEMQPLLS |
| | | | ANNSFDGLYDIYANIDDEAPGLSSQSVATPSAHL |
| | | | PIKPSTLSFASNTTNVTAPLGNVWETPFYSGPDI |
| | | | VLPTGPSTWPFVPQSPYDVTHDVYIQGSSFALWP |
| | | | VYFFRRRRRKRIPYFFADGDVAA |
| HPV58 | D90400 | | MDDPEGTNGVGAGCTGWFEVEAVIERRTGDNISD |
| E1 | | | DEDETADDSGTDLIEFIDDSVQSTTQAEAEAARA |
| | | | LFNVQEGVDDINAVCALKRKFAACSESAVEDCVD |
| | | | RAANVCVSWKYKNKECTHRKRKIIELEDSGYGNT |
| | | | EVETEQMAHQVESQNGDADLNDSESSGVGASSDV |
| | | | SSETDVDSCNTVPLQNISNILHNSNTKATLLYKF |
| | | | KEAYGVSFMELVRPFKSDKTSCTDWCITGYGISP |
| | | | SVAESLKVLIKQHSIYTHLQCLTCDRGIILLLIR |
| | | | FKCSKNRLTVAKLMSNLLSIPETCMIIEPPKLRS |
| | | | QACALYWFRTAMSNISDVQGTTPEWIDRLTVLQH |
| | | | SFNDDIFDLSEMIQWAYDNDITDDSDIAYKYAQL |
| | | | ADVNSNAAAFLRSNAQAKIVKDCGVMCRHYKRAE |
| | | | KRGMTMGQWIQSRCEKTNDGGNWRPIVQFLRYQN |
| | | | IEFTAFLVAFKQFLQGVPKKSCMLLCGPANTGKS |
| | | | YFGMSLIHFLKGCIISYVNSKSHFWLQPLSDAKL |
| | | | GMIDDVTAISWTYIDDYMRNALDGNDISIDVKHR |
| | | | ALVQLKCPPLIITSNTNAGKDSRWPYLHSRLTVF |
| | | | EFNNPFPFDANGNPVYKINDENWKSFFSRTWCKL |
| | | | GLIEEEDKENPGGNISTFKCSAGQNPRHIRS |
| HPV58 | | | MEEISARLSAVQDKILDIYEADKNDLTSQIEHWK |
| E2 | | | LIRMECAIMYTARQMGISHLCHQVVPSLVASKTK |
| | | | AFQVIELQMALETLNASPYKTDEWTLQQTSLEVW |
| | | | LSEPQKCFKKKGITVTVQYDNDKANTMDYTNWSE |
| | | | IYIIEETTCTLVAGEVDYVGLYYIHGNEKTYFKY |
| | | | FKEDAKKYSKTQLWEVHVGSRVIVCPTSIPSDQI |
| | | | STTETADPKTTEATNNESTQGTKRRRLDLPDSRD |
| | | | NTQYSTKYTDCAVDSRPRGGGLHSTTNCTYKGRN |
| | | | VCSSKVSPIVHLKGDPNSLKCLRYRLKPFKDLYC |
| | | | NMSSTWHWTSDDKGDKVGIVTVTYTTETQRQLFL |
| | | | NTVKIPPTVQISTGVMSL |
| HPV58 | | | MFQDAEEKPRTLHDLCQALETSVHEIELKCVECK |
| E6 | | | KTLQRSEVYDFVFADLRIVYRDGNPFAVCKVCLR |
| | | | LLSKISEYRHYNYSLYGDTLEQTLKKCLNEILIR |
| | | | CIICQRPLCPQEKKRHVDLNKREHNISGRWTGRC |
| | | | AVCWRPRRRQTQV |
| HPV58 | | | MRGNNPTLREYILDLHPEPTDLFCYEQLCDSSDE |
| E7 | | | DEIGLDGPDGQAQPATANYYIVTCCYTCGTFVRL |
| | | | CINSTTTDVRTLQQLLMGTCTIVCPSCAQQ |
| HPV58 | | | MVLILCCTLAILFCVADVNVFHIFLQMSVWRPSE |
| L1 | | | ATVYLPPVPVSKVVSTDEYVSRTSIYYYAGSSRL |
| | | | LAVGNPYFSIKSPNNNKKVLVPKVSGLQYRVFRV |
| | | | RLPDPNKFGFPDTSFYNPDTQRLVWACVGLEIGR |
| | | | GQPLGVGVSGHPYLNKFDDTETSNRYPAQPGSDN |
| | | | RECLSMDYKQTQLCLIGCKPPTGEHWGKGVACNN |
| | | | NAAATDCPPLELFNSIIEDGDMVDTGFGCMDFGT |
| | | | LQANKSDVPIDICNSTCKYPDYLKMASEPYGDSL |
| | | | FFFLRREQMFVRHFFNRAGKLGEAVPDDLYIKGS |
| | | | GNTAVIQSSAFFPTPSGSIVTSESQLFNKPYWLQ |
| | | | RAQGHNNGICWGNQLFVTVVDTTRSTNMTLCTEV |
| | | | TKEGTYKNDNFKEYVRHVEEYDLQFVFQLCKITL |
| | | | TAEIMTYIHTMDSNILEDWQFGLTPPPSASLQDT |
| | | | YRFVTSQAITCQKTAPPKEKEDPLNKYTFWEVNL |
| | | | KEKFSADLDQFPLGRKFLLQSGLKAKPRLKRSAP |
| | | | TTRAPSTKRKKVKK |
| HPV58 | | | MRHKRSTRRKRASATQLYQTCKASGTCPPDVIPK |
| L2 | | | VEGTTIADQILRYGSLGVFFGGLGIGTGSGTGGR |
| | | | TGYVPLGSTPPSEAIPLQPIRPPVTVDTVGPLDS |
| | | | SIVSLIEESSFIDAGAPAPSIPTPSGFDITTSAD |
| | | | TTPAILNVSSIGESSIQTVSTHLNPSFTEPSVLR |
| | | | PPAPAEASGHLIFSSPTVSTHSYENIPMDTFVIS |
| | | | TDSGNVTSSTPIPGSRPVARLGLYSRNTQQVKVV |
| | | | DPAFLTSPHRLVTYDNPAFEGFNPEDTLQFQHSD |
| | | | ISPAPDPDFLDIVALHRPALTSRRGTVRYSRVGQ |
| | | | KATLRTRSGKQIGAKVHYYQDLSPIQPVQEQVQQ |
| | | | QQQFELQSLNTSVSPYSINDGLYDIYADDADTIH |
| | | | DFQSPLHSHTSFATTRTSNVSIPLNTGFDTPLVS |
| | | | LEPGPDIASSVTSMSSFIPISPLTPFNTIIVDGA |
| | | | DFMLHPSYFILRRRRKRFPYFFADVRVAA |

[0271] The epitopes of the invention have been identified in a number of ways, as will be discussed below. Also discussed in greater detail is that peptide analogs derived from naturally occurring HPV sequences exhibit binding to HLA molecules and immunogenicity due to the modification of specific amino acid residues with respect to the naturally occurring HPV sequence. Further, the present invention provides compositions and combinations of compositions that enable epitope-based vaccines that are capable of interacting with HLA molecules encoded by various genetic alleles to provide broader population coverage than prior vaccines.

Definitions

[0272] The invention can be better understood with reference to the following definitions, which are listed alphabetically:

[0273] An “antigen” refers to a polypeptide encoded by the genome of an infectious agent, in this case, HPV. Examples of HPV antigens include E1, E2, E3, E4, E5, E6, E7, L1, and L2.

[0274] The designation of a residue position in an epitope as the “carboxyl terminus” or the “carboxyl terminal position” refers to the residue position at the carboxy terminus of the epitope, which is designated using conventional nomenclature as defined below. The “carboxyl terminal position” of the epitope occurring at the carboxyl end of the multi-epitope construct may or may not actually correspond to the carboxyl terminal end of a polypeptide. “C+1” refers to the residue or position immediately following the C-terminal residue of the epitope, i.e., refers to the residue flanking the C-terminus of the epitope. In preferred embodiments, the epitopes employed in the optimized multi-epitope constructs of the invention are motif-bearing epitopes and the carboxyl terminus of the epitope is defined with respect to primary anchor residues corresponding to a particular motif. In preferred embodiments, the carboxyl terminus of the epitope is defined as positions +8, +9, +10 or +11.

[0275] The designation of a residue position in an epitope as “amino terminus” or “amino-terminal position” refers to the residue position at the amino terminus of the epitope, which is designated using conventional nomenclature as defined below. The “amino terminal position” of the epitope occurring at the amino terminal end of the multi-epitope construct may or may not actually correspond to the amino terminal end of the polypeptide. “N−1” refers to the residue or position immediately adjacent to the epitope at the amino terminal end of an epitope. In preferred embodiments, the epitopes employed in the optimized multi-epitope constructs of the invention are motif-bearing epitopes and the amino terminus of the epitope is defined with respect to primary anchor residues corresponding to a particular motif. In preferred embodiments, the amino terminus of the epitope is defined as position +1.

[0276] A “computer” or “computer system” generally includes: a processor; at least one information storage and/or retrieval apparatus such as, for example, a hard drive, a disk drive or a tape drive; at least one input apparatus such as, for example, a keyboard, a mouse, a touch screen, or a microphone; and display structure. Additionally, the computer may include a communication channel in communication with a network such that remote users may communicate with the computer via the network to perform multi-epitope construct optimization functions disclosed herein. Such a computer may include more or less than what is listed above. The network may be a local area network (LAN), wide area network (WAN) or a global network such as the world wide web (e.g., the internet).

[0277] A “construct” as used herein generally denotes a composition that does not occur in nature. A construct may be a “polynucleotide construct” or a “polypeptide construct.” A construct can be produced by synthetic technologies, e.g., recombinant DNA preparation and expression or chemical synthetic techniques for nucleic or amino acids or peptides or polypeptides. A construct can also be produced by the addition or affiliation of one material with another such that the result is not found in nature in that form. Although a “construct” is not naturally occurring, it may comprise peptides that are naturally occurring.

[0278] The term “multi-epitope construct” when referring to nucleic acids and polynucleotides can be used interchangeably with the terms “minigene,” “minigene construct,” “multi-epitope nucleic acid vaccine,” “multi-epitope vaccine,” and other equivalent phrases (e.g., “epigene”), and comprises multiple epitope-encoding nucleic acids that encode peptide epitopes of any length that can bind to a molecule functioning in the immune system, preferably a class I HLA and a T-cell receptor or a class II HLA and a T-cell receptor. The nucleic acids encoding the epitopes in a multi-epitope construct can encode class I HLA epitopes and/or class II HLA epitopes. Class I HLA epitope-encoding nucleic acids are referred to as CTL epitope-encoding nucleic acids, and class II HLA epitope-encoding epitope nucleic acids are referred to as HTL epitope-encoding nucleic acids. Some multi-epitope constructs can have a subset of the multi-epitope-encoding nucleic acids encoding class I HLA epitopes and another subset of the multi-epitope-encoding nucleic acids encoding class II HLA epitopes. The CTL epitope-encoding nucleic acids preferably encode an epitope peptide of about 15 residues in length, less than about 15 residues in length, or less than about 13 amino acids in length, or less than about 11 amino acids in length, preferably about 8 to about 13 amino acids in length, more preferably about 8 to about 11 amino acids in length (e.g., 8, 9, 10, or 11), and most preferably about 9 or 10 amino acids in length. The HTL epitope nucleic acids can encode an epitope peptide of about 50 residues in length, less than about 50 residues in length, and usually consist of about 6 to about 30 residues, more usually between about 12 to 25, and often about 15 to 20, and preferably about 7 to about 23, preferably about 7 to about 17, more preferably about 11 to about 15 (e.g., 11, 12, 13, 14 or 15), and most preferably about 13 amino acids in length. The multi-epitope constructs described herein preferably include 5 or more, 10 or more, 15 or more, 20 or more, 25 or more, 30 or more, 35 or more, 40 or more, 45 or more, 50 or more, 55 or more, 60 or more, 65 or more, 70 or more, or 75 or more epitope-encoding nucleic acid sequences. All of the epitope-encoding nucleic acids in a multi-epitope construct may be from one organism (e.g., the nucleotide sequence of every epitope-encoding nucleic acid may be present in HPV strains), or the multi-epitope construct may include epitope-encoding nucleic acid sequences present in two or more different organisms (e.g., the nucleotide sequence of some epitope encoding nucleic acid sequences from HPV, and/or some from HPV, and/or some from HIV, and/or some from HCV). The epitope-encoding nucleic acid molecules in a multi-epitope construct may also be from multiple strains or types of an organism (e.g., HPV Types 16, 18, 31, 33, 45, 52, 58 and/or 56). The term “minigene” is used herein to refer to certain multi-epitope constructs. As described hereafter, one or more epitope-encoding nucleic acids in the multi-epitope construct may be flanked by spacer nucleotides, and/or other polynucleotide sequences also described herein or otherwise known in the art.

[0279] The term “multi-epitope construct,” when referring to polypeptides, can be used interchangeably with the terms “minigene construct,” multi-epitope vaccine,” and other equivalent phrases, and comprises multiple peptide epitopes of any length that can bind to a molecule functioning in the immune system, preferably a class I HLA and a T-cell receptor or a class II HLA and a T-cell receptor. The epitopes in a multi-epitope construct can be class I HLA epitopes and/or class II HLA epitopes. Class I HLA epitopes are referred to as CTL epitopes, and class II HLA epitopes are referred to as HTL epitopes. Some multi-epitope constructs can have a subset of class I HLA epitopes and another subset of class II HLA epitopes. The CTL Epitopes preferably are about 15 amino acid residues in length, less than about 15 amino acid residues in length, or less than about 13 amino acid residues in length, or less than about 11 amino acid residues in length, and preferably encode an epitope peptide of about 8 to about 13 amino acid residues in length, more preferably about 8 to about 11 amino acid residues in length (e.g., 8, 9, 10 or 11), and most preferably about 9 or 10 amino acid residues in length. The HTL epitopes are about 50 amino acid residues in length, less than about 50 amino acid residues in length, and usually consist of about 6 to about 30 amino acid residues in length, more usually between about 12 to about 25 amino acid residues in length, and preferably about 7 to about 23 amino acid residues in length, preferably about 7 to about 17 amino acid residues in length, more preferably about 11 to about 15 amino acid residues in length (e.g., 11, 12, 13, 14 or 15), and most preferably about 13 amino acid residues in length. The multi-epitope constructs described herein preferably include 5 or more, 10 or more, 15 or more, 20 or more, 25 or more, 30 or more, 35 or more, 40 or more, 45 or more, 50 or more, 55 or more, 60 or more, 65 or more, 70 or more, or 75 or more epitopes. All of the epitopes in a multi-epitope construct may be from one organism (e.g., every epitope may be present in one or more HPV strains), or the multi-epitope construct may include epitopes present in two or more different organisms (e.g., some epitopes from HPV and/or some from HIV, and/or some from HCV, and/or some from HBV). The epitopes in a multi-epitope construct may also be from multiple strains or types of an organism (e.g., HPV Types 6a, 6b, 11a, 16, 18, 31, 33, 45, 52, 56 and/or 58). The term “minigene” is used herein to refer to certain multi-epitope constructs. As described hereafter, one or more epitopes in the multi-epitope construct may be flanked by a spacer sequence, and or other sequences also described herein or otherwise known in the art.

[0280] “Cross-reactive binding” indicates that a peptide can bind more than one HLA molecule; a synonym is degenerate binding.

[0281] A “cryptic epitope” elicits a response by immunization with an isolated peptide, but the response is not cross-reactive in vitro when intact whole protein which comprises the epitope is used as an antigen.

[0282] A “dominant epitope” is an epitope that induces an immune response upon immunization with a whole native antigen (see, e.g., Sercarz, et al., Ann. Rev. Immunol. 11:729-66, 1993). Such a response is cross-reactive in vitro with an isolated peptide epitope.

[0283] An “epitope” is a set of amino acid residues linked together by amide bonds in a linear fashion. In the context of immunoglobulins, an “epitope” is involved in recognition and binding to a particular immunoglobulin. In the context of T cells, an “epitope” is those amino acid residues necessary for recognition by T cell receptor proteins and/or Major Histocompatibility Complex (MHC) receptors. In both contexts, in vivo or in vitro, an epitope is the collective features of a molecule, such as primary, secondary and tertiary peptide structure, and charge, that together form an entity recognized by an immunoglobulin, T cell receptor or HLA molecule. Throughout this disclosure “epitope,” “peptide epitope,” and “peptide” are often used interchangeably. It is to be appreciated, however, that isolated or purified protein or peptide molecules larger than and comprising an epitope of the invention are still within the bounds of the invention.

[0284] A “flanking residue” is an amino acid residue that is positioned next to an epitope. A flanking residue can be introduced or inserted at a position adjacent to the N-terminus or the C-terminus of an epitope, or that occurs naturally in the intact protein.

[0285] “Heteroclitic analogs” are defined herein as peptides with increased potency for a specific T cell, as measured by increased responses to a given dose, or by a requirement of lesser amounts to achieve the same response. Advantages of heteroclitic analogs include that the epitopes can be more potent, or more economical (since a lower amount is required to achieve the same effect). In addition, modified epitopes might overcome antigen-specific T cell unresponsiveness (T cell tolerance). (See, e.g., PCT Publication No. WO01/36452, which is hereby incorporated by reference in its entirety.)

[0286] The term “homology,” as used herein, refers to a degree of complementarity between two nucleotide sequences. The word “identity” may substitute for the word “homology” when a polynucleotide has the same nucleotide sequence as another polynucleotide. Sequence homology and sequence identity can also be determined by hybridization studies under high stringency and/or low stringency, are disclosed herein and encompassed by the invention, are polynucleotides that hybridize to the multi-epitope constructs under low stringency or under high stringency. Also, sequence homology and sequence identity can be determined by analyzing sequences using algorithms and computer programs known in the art (e.g., BLAST). Such methods be used to assess whether a polynucleotide sequence is identical or homologous to the multi-epitope constructs disclosed herein. The invention pertains in part to nucleotide sequences having 80% or more, 85% or more, 90% or more, 95% or more, 97% or more, 98% or more, or 99% or more identity to the nucleotide sequence of a multi-epitope construct disclosed herein. In a preferred embodiment, a nucleotide sequence of the invention will have 70%, 80%, 85%, 90%, 91%, 92%, 93%, 94%, 95%, 96%, 97%, 98% or 99% identity to a reference sequence. In a more preferred embodiment, a nucleotide sequence of the invention will have 90%, 91%, 92%, 93%, 94%, 95%, 96%, 97%, 98% or 99% identity to a reference sequence. In a more preferred embodiment, a nucleotide sequence of the invention will have 95%, 96%, 97%, 98% or 99% identity to a reference sequence.

[0287] As used herein, the term “stringent conditions” refers to conditions which permit hybridization between nucleotide sequences and the nucleotide sequences of the disclosed multi-epitope constructs. Suitable stringent conditions can be defined by, for example, the concentrations of salt or formamide in the prehybridization and hybridization solutions, or by the hybridization temperature, and are well known in the art. In particular, stringency can be increased by reducing the concentration of salt, increasing the concentration of formamide, or raising the hybridization temperature. For example, hybridization under high stringency conditions could occur in about 50% formamide at about 37° C. to 42° C. In particular, hybridization could occur under high stringency conditions at 42° C. in 50% formamide, 5×SSPE, 0.3% SDS, and 200 μg/ml sheared and denatured salmon sperm DNA or at 42° C. in a solution comprising 50% formamide, 5×SSC (750 mM NaCl, 75 mM trisodium citrate), 50 mM sodium phosphate (pH 7.6), 5× Denhardt's solution, 10% dextran sulfate, and 20 μg/ml denatured, sheared salmon sperm DNA, followed by washing the filters in 0.1×SSC at about 65° C. Hybridization could occur under reduced stringency conditions in about 35% to 25% formamide at about 30° C. to 35° C. For example, reduced stringency conditions could occur at 35° C. in 35% formamide, 5×SSPE, 0.3% SDS, and 200 μg/ml sheared and denatured salmon sperm DNA. The temperature range corresponding to a particular level of stringency can be further narrowed by calculating the purine to pyrimidine ratio of the nucleic acid of interest and adjusting the temperature accordingly. Variations on the above ranges and conditions are well known in the art.

[0288] In addition to utilizing hybridization studies to assess sequence identity or sequence homology, known computer programs may be used to determine whether a particular polynucleotide sequence is homologous to a multi-epitope construct disclosed herein. An example of such a program is the Bestfit program (Wisconsin Sequence Analysis Package, Version 8 for Unix, Genetics Computer Group, University Research Park, 575 Science Drive, Madison, Wis. 53711), and other sequence alignment programs are known in the art and may be utilized for determining whether two or more nucleotide sequences are homologous. Bestfit uses the local homology algorithm of Smith and Waterman (Adv. Appl. Mathematics 2: 482-89 (1981)), to find the best segment of homology between two sequences. When using Bestfit or any other sequence alignment program to determine whether a particular sequence is, for instance, 95% identical to a reference sequence, the parameters may be set such that the percentage of identity is calculated over the full length of the reference nucleotide sequence and that gaps in homology of up to 5% of the total number of nucleotides in the reference sequence are allowed.

[0289] “Human Leukocyte Antigen” or “HLA” is a human class I or class II Major Histocompatibility Complex (MHC) protein (see, e.g., Stites, et al., Immunology, 8th Ed., Lange Publishing, Los Altos, Calif. (1994)).

[0290] An “HLA supertype or family,” as used herein, describes sets of HLA molecules grouped on the basis of shared peptide-binding specificities. HLA class I molecules that share somewhat similar binding affinity for peptides bearing certain amino acid motifs are grouped into HLA supertypes. The terms “HLA superfamily,” “HLA supertype family,” “HLA family,” and “HLA xx-like molecules” (where xx denotes a particular HLA type), are synonyms.

[0291] Throughout this disclosure, binding data results are often expressed in terms of “IC₅₀.” IC₅₀ is the concentration of peptide in a binding assay at which 50% inhibition of binding of a reference peptide is observed. Given the conditions in which the assays are run (i.e., limiting HLA proteins and labeled peptide concentrations), these values approximate KD values. Assays for determining binding are described in detail, e.g., in PCT publications WO 94/20127 and WO 94/03205, which are hereby incorporated by reference in their entireties. It should be noted that IC₅₀ values can change, often dramatically, if the assay conditions are varied, and depending on the particular reagents used (e.g., HLA preparation, etc.). For example, excessive concentrations of HLA molecules will increase the apparent measured IC₅₀ of a given ligand.

[0292] Notwithstanding this fact, binding in the disclosure provided herein is expressed relative to a reference peptide. Although a particular assay may become more, or less, sensitive, and the IC₅₀'s of the peptides tested may change somewhat, the binding relative to the reference peptide will not significantly change. For example, in an assay run under conditions such that the IC₅₀ of the reference peptide increases 10-fold, the IC₅₀ values of the test peptides will also shift commensurately (i.e., approximately 10-fold in this example). Therefore, to avoid ambiguities, the assessment of whether a peptide is a “good,” “intermediate,” “weak,” or “negative” binder is generally based on its IC₅₀, relative to the IC₅₀ of a standard peptide.

[0293] Binding may also be determined using other assay systems including those using: live cells (e.g., Ceppellini, et al., Nature 339:392, 1989; Christnick, et al., Nature 352:67, 1991; Busch, et al., Int. Immunol. 2:443, 1990; Hill, et al., J. Immunol. 147:189, 1991; del Guercio, et al., J. Immunol. 154:685, 1995), cell free systems using detergent lysates (e.g., Cerundolo, et al., J. Immunol. 21:2069, 1991), immobilized purified MHC (e.g., Hill, et al., J. Immunol. 152, 2890, 1994; Marshall, et al., J. Immunol. 152:4946, 1994), ELISA systems (e.g., Reay, et al., EMBO J. 11:2829, 1992), surface plasmon resonance (e.g., Khilko, et al., J. Biol. Chem. 268:15425, 1993); high flux soluble phase assays (Hammer, et al., J. Exp. Med. 180:2353, 1994), and measurement of class I MHC stabilization or assembly (e.g., Ljunggren, et al., Nature 346:476, 1990; Schumacher, et al., Cell 62:563, 1990; Townsend, et al., Cell 62:285, 1990; Parker, et al., J. Immunol. 149:1896, 1992).

[0294] As used herein with respect to HLA class I molecules, “high affinity” is defined as binding with an IC₅₀, or KD value, of 50 nM or less; “intermediate affinity” is binding with an IC₅₀ or KD value of between about 50 and about 500 nM. With respect to binding to HLA class II molecules, “high affinity” is defined as binding with an IC₅₀ or KD value of 100 nM or less; “intermediate affinity” is binding with an IC₅₀ or KD value of between about 100 and about 1000 nM.

[0295] A peptide epitope occurring with “high frequency” is one that occurs in at least 30%, at least 40%, at least 50%, at least 60%, at least 70%, at least 80%, or at least 90% of the infectious agents in a population. A “high frequency” peptide epitope is one of the more common in a population, preferably the first most common, second most common, third most common, or fourth most common in a population of variant peptide epitopes.

[0296] The terms “identical” or percent “identity,” in the context of two or more peptide or nucleic acid sequences, refers to two or more sequences or subsequences that are the same or have a specified percentage of amino acid residues that are the same, when compared and aligned for maximum correspondence over a comparison window, as measured using a sequence comparison algorithm (e.g., BLAST) or by manual alignment and visual inspection.

[0297] An “immunogenic peptide” or “immunogenic peptide epitope” is a peptide that comprises an allele-specific motif or supermotif such that the peptide will bind an HLA molecule and induce a CTL and/or HTL response. Thus, immunogenic peptides of the invention are capable of binding to an appropriate HLA molecule and thereafter inducing a cytotoxic T cell response, or a helper T cell response, to the antigen from which the immunogenic peptide is derived.

[0298] The phrases “isolated” or “biologically pure” refer to material which is substantially or essentially free from components which normally accompany the material as it is found in its native state. Thus, isolated peptides in accordance with the invention preferably do not contain materials normally associated with the peptides in their in situ environment.

[0299] “Introducing” an amino acid residue at a particular position in a multi-epitope construct, e.g., adjacent, at the C-terminal side, to the C-terminus of the epitope, encompasses configuring multiple epitopes such that a desired residue is at a particular position, e.g., adjacent to the epitope, or such that a deleterious residue is not adjacent to the C-terminus of the epitope. The term also includes inserting an amino acid residue, preferably a preferred or intermediate amino acid residue, at a particular position. An amino acid residue can also be introduced into a sequence by substituting one amino acid residue for another. Preferably, such a substitution is made in accordance with analoging principles set forth, e.g., in co-pending U.S. patent application Ser. No. 09/260,714, filed Mar. 1, 1999; PCT Application No. PCT/US00/19774; and/or PCT Application No. PCT/US00/31856; each of which is hereby incorporated in its entirety.

[0300] “Link” or “join” refers to any method known in the art for functionally connecting peptides, including, without limitation, recombinant fusion, covalent bonding, disulfide bonding, ionic bonding, hydrogen bonding, and electrostatic bonding.

[0301] “Major Histocompatibility Complex” or “MHC” is a cluster of genes that plays a role in control of the cellular interactions responsible for physiologic immune responses. In humans, the MHC complex is also known as the HLA complex. For a detailed description of the MHC and HLA complexes, see, Paul, Fundamental Immunology, 3rd Ed., Raven Press, New York, 1993.

[0302] As used herein, “middle of the peptide” is a position in a peptide that is neither an amino nor a carboxyl terminus.

[0303] The term “motif” refers to the pattern of residues in a peptide of defined length, usually a peptide of from about 8 to about 13 amino acids for a class I HLA motif and from about 6 to about 25 amino acids for a class II HLA motif, which is recognized by a particular HLA molecule. Peptide motifs are typically different for each protein encoded by each human HLA allele and differ in the pattern of the primary and secondary anchor residues.

[0304] A “negative binding residue” or “deleterious residue” is an amino acid which, if present at certain positions (typically not primary anchor positions) in a peptide epitope, results in decreased binding affinity of the peptide for the peptide's corresponding HLA molecule.

[0305] A “non-native” sequence or “construct” refers to a sequence that is not found in nature, i.e., is “non-naturally occurring”. Such sequences include, e.g., peptides that are lipidated or otherwise modified, and polyepitopic compositions that contain epitopes that are not contiguous to the same epitopic and non-epitopic sequences found in a native protein sequence.

[0306] The phrase “operably linked” refers to a linkage in which a nucleotide sequence is connected to another nucleotide sequence (or sequences) in such a way as to be capable of altering the functioning of the sequence (or sequences). For example, a nucleic acid or multi-epitope nucleic acid construct which is operably linked to a regulatory sequence such as a promoter/operator places expression of the polynucleotide sequence of the construct under the influence or control of the regulatory sequence. Two nucleotide sequences (such as a protein encoding sequence and a promoter region sequence linked to the 5′ end of the coding sequence) are said to be operably linked if induction of promoter function results in the transcription of the protein coding sequence mRNA and if the nature of the linkage between the two nucleotide sequences does not (1) result in the introduction of a frame-shift mutation nor (2) prevent the expression regulatory sequences to direct the expression of the mRNA or protein. Thus, a promoter region would be operably linked to a nucleotide sequence if the promoter were capable of effecting transcription of that nucleotide sequence under appropriate conditions.

[0307] “Optimizing” refers to increasing the immunogenicity or antigenicity of a multi-epitope construct having at least one epitope pair by sorting epitopes to minimize the occurrence of junctional epitopes, inserting flanking residues that flank the C-terminus and/or N-terminus of an epitope, and inserting one or more spacer residues to further prevent the occurrence of junctional epitopes and/or to provide one or more flanking residues. An increase in immunogenicity or antigenicity of an optimized multi-epitope construct is measured relative to a multi-epitope construct that has not been constructed based on the optimization parameters using assays known to those of skill in the art, e.g., assessment of immunogenicity in HLA transgenic mice, ELISPOT, inteferon-gamma release assays, tetramer staining, chromium release assays, and/or presentation on dendritic cells.

[0308] The term “peptide” is used interchangeably with “oligopeptide” in the present specification to designate a series of residues, typically 1-amino acids, connected one to the other, typically by peptide bonds between the α-amino and carboxyl groups of adjacent amino acids. The preferred CTL-inducing peptides of the invention are about 15 residues in length, less than about 15 residues in length, and preferably 13 residues or less in length and preferably are about 8 to about 13 amino acids in length (e.g., 8, 9, 10, or 11), and usually consist of between about 8 and about 11 residues, preferably 9 or 10 residues. The preferred HTL-inducing oligopeptides are about 50 residues in length, less than about 50 residues in length, usually about 6 to about 30 residues, and usually consist of between about 6 and about 30 residues, more usually between about 12 and 25, and often between about 15 and 20 residues, or about 7 to about 23, preferably about 7 to about 17, more preferably about 11 to about 15 (e.g., 11, 12, 13, 14, or 15), and most preferably about 13 amino acids in length. The multi-epitope constructs described herein preferably include 5 or more, 10 or more, 15 or more, 20 or more, 25 or more, 30 or more, 35 or more, 40 or more, 45 or more, 50 or more, 55 or more, 60 or more, 65 or more, 70 or more, 75 or more epitope-encoding nucleic acids. In highly preferred embodiments, the multi-epitope constructs described herein include 30 or more (e.g., 30, 31, 32, 33, 34, 35, 36, 37, 38, 39, 40, 41, 42, 43, 44, 45, 46, 47, 48, 49, 50, 51, 52, 53, 54, 55, 56, 57, 58, 59, 60, 61, 62, 63, 64, 65, 66, 67, 68, 69, 70, 71, 72, 73, 74 or 75) epitope-encoding nucleic acids.

[0309] The nomenclature used to describe peptide, polypeptide, and protein compounds follows the conventional practice wherein the amino group is presented to the left (the N-terminus) and the carboxyl group to the right (the C-terminus) of each amino acid residue. When amino acid residue positions are referred to in a peptide epitope they are numbered in an amino to carboxyl direction with position one being the position at the amino terminal end of the epitope, or the peptide or protein of which it may be a part. In the formulae representing selected specific embodiments of the present invention, the amino- and carboxyl-terminal groups, although not specifically shown, are in the form they would assume at physiologic pH values, unless otherwise specified. In the amino acid structure formulae, each residue is generally represented by standard three letter or single letter designations. The L-form of an amino acid residue is represented by a capital single letter or a capital first letter of a three-letter symbol, and the D-form for those amino acids having D-forms is represented by a lower case single letter or a lower case three letter symbol. Glycine has no asymmetric carbon atom and is simply referred to as “Gly” or G. The amino acid sequences of peptides set forth herein are generally designated using the standard single letter symbol. (A, Alanine; C, Cysteine; D, Aspartic Acid; E, Glutamic Acid; F, Phenylalanine; G, Glycine; H, Histidine; I, Isoleucine; K, Lysine; L, Leucine; M, Methionine; N, Asparagine; P, Proline; Q, Glutamine; R, Arginine; S, Serine; T, Threonine; V, Valine; W, Tryptophan; and Y, Tyrosine.) In addition to these symbols, “B”in the single letter abbreviations used herein designates α-amino butyric acid. Symbols for the amino acids are shown below in Table 2.

TABLE 2

| Single Letter Symbol | Three Letter Symbol | Amino Acids |
|---|---|---|
| A | Ala | Alanine |
| C | Cys | Cysteine |
| D | Asp | Aspartic Acid |
| E | Glu | Glutamic Acid |
| F | Phe | Phenylalanine |
| G | Gly | Glycine |
| H | His | Histidine |
| I | Ile | Isoleucine |
| K | Lys | Lysine |
| L | Leu | Leucine |
| M | Met | Methionine |
| N | Asn | Asparagine |
| P | Pro | Proline |
| Q | Gln | Glutamine |
| R | Arg | Arginine |
| S | Ser | Serine |
| T | Thr | Threonine |
| V | Val | Valine |
| W | Trp | Tryptophan |
| Y | Tyr | Tyrosine |

[0310] Amino acid “chemical characteristics” are defined as: Aromatic (F, W, Y); Aliphatic-hydrophobic (L, I, V, M); Small polar (S, T, C); Large polar (Q, N); Acidic (D, E); Basic (R, H, K); Proline; Alanine; and Glycine.

[0311] It is to be appreciated that protein or peptide molecules that comprise an epitope of the invention as well as additional amino acid residues are within the bounds of the invention. In certain embodiments, there is a limitation on the length of a peptide of the invention which is not otherwise a construct as defined herein. An embodiment that is length-limited occurs when the protein/peptide comprising an epitope of the invention comprises a region (i.e., a contiguous series of amino acid residues) having 100% identity with a native sequence. In order to avoid a recited definition of epitope from reading, e.g., on whole natural molecules, the length of any region that has 100% identity with a native peptide sequence is limited. Thus, for a peptide comprising an epitope of the invention and a region with 100% identity with a native peptide sequence (and which is not otherwise a construct), the region with 100% identity to a native sequence generally has a length of: less than or equal to 600 amino acid residues, often less than or equal to 500 amino acid residues, often less than or equal to 400 amino acid residues, often less than or equal to 250 amino acid residues, often less than or equal to 100 amino acid residues, often less than or equal to 85 amino acid residues, often less than or equal to 75 amino acid residues, often less than or equal to 65 amino acid residues, and often less than or equal to 50 amino acid residues, often less than 40, 30, 25, 20, 19, 18, 17, 16, 15, 14, 13, 12, 11, 10 or 9 amino acid residues. In certain embodiments, an “epitope” of the invention which is not a construct is comprised by a peptide having a region with less than 51 amino acid residues that has 100% identity to a native peptide sequence, in any increment down to 5 amino acid residues (e.g., 50, 49, 48, 47, 46, 45, 44, 43, 42, 41, 40, 39, 38, 37, 36, 35, 34, 33, 32, 31, 30, 29, 28, 27, 26, 25, 24, 23, 22, 21, 20, 19, 18, 17, 16, 15, 14, 13, 12, 11, 10, 9, 8, 7, 6 or 5 amino acid residues).

[0312] Certain peptide or protein sequences longer than 600 amino acids are within the scope of the invention. Such longer sequences are within the scope of the invention provided that they do not comprise any contiguous sequence of more than 600 amino acids that have 100% identity with a native peptide sequence, or if longer than 600 amino acids, they are a construct. For any peptide that has five contiguous residues or less that correspond to a native sequence, there is no limitation on the maximal length of that peptide in order to fall within the scope of the invention. It is presently preferred that a CTL epitope of the invention be less than 600 residues long in any increment down to eight amino acid residues.

[0313] The terms “PanDR binding peptide,” “PanDR binding epitope,” “PADRE® peptide,” and “PADRE® epitope,” refer to a type of HTL peptide which is a member of a family of molecules that binds more than one HLA class II DR molecule. PADRE® peptides bind to most HLA-DR molecules and stimulate in vitro and in vivo human helper T lymphocyte (HTL) responses. The pattern that defines the PADRE® family of molecules can be thought of as an HLA Class II supermotif. For example, a PADRE® peptide may comprise the formula: aKXVAAWTLKAAa, where “X” is either cyclohexylalanine, phenylalanine or tyrosine and “a” is either D-alanine or L-alanine, has been found to bind to most HLA-DR alleles, and to stimulate the response of T helper lymphocytes from most individuals, regardless of their HLA type. An alternative of a PADRE® epitope comprises all “L” natural amino acids which can be provided in peptide/polypeptide form and in the form of nucleic acids that encode the epitope, e.g., in multi-epitope constructs. Specific examples of PADRE® peptides are also disclosed herein. Polynucleotides encoding PADRE® peptides are also contemplated as part of the present invention. PADRE® epitopes are described in detail in U.S. Pat. Nos. 5,679,640, 5,736,142, and 6,413,935; each of which is hereby incorporated by reference in its entirety.

[0314] “Pharmaceutically acceptable” refers to a non-toxic, inert, and/or physiologically compatible composition.

[0315] A “pharmaceutical excipient” comprises a material such as an adjuvant, a carrier, pH-adjusting and buffering agents, tonicity adjusting agents, wetting agents, preservatives, and the like.

[0316] “Presented to an HLA Class I processing pathway” means that the multi-epitope constructs are introduced into a cell such that they are largely processed by an HLA Class I processing pathway. Typically, multi-epitope constructs are introduced into the cells using expression vectors that encode the multi-epitope constructs. HLA Class II epitopes that are encoded by such a multi-epitope construct are also presented on Class II molecules, although the mechanism of entry of the epitopes into the Class II processing pathway is not defined.

[0317] A “primary anchor residue” or a “primary MHC anchor” is an amino acid at a specific position along a peptide sequence which is understood to provide a contact point between the immunogenic peptide and the HLA molecule. One, two or three, usually two, primary anchor residues within a peptide of defined length generally define a “motif” for an immunogenic peptide. These residues are understood to fit in close contact with peptide binding grooves of an HLA molecule, with their side chains buried in specific pockets of the binding grooves themselves. In one embodiment, for example, the primary anchor residues of an HLA class I epitope are located at position 2 (from the amino terminal position, wherein the N-terminal amino acid residue is at position +1) and at the carboxyl terminal position of a 9-residue peptide epitope in accordance with the invention. The primary anchor positions for each motif and supermotif disclosed herein are set forth in Table 3 herein or in Tables I and III of PCT/US00/27766, or PCT/US00/19774.

TABLE 3

| | | | POSITION |
|---|---|---|---|
| | POSITION | POSITION | C Terminus |
| | 2 (Primary | 3 (Primary | (Primary |
| | Anchor) | Anchor) | Anchor) |
| SUPERMOTIFS | | | |
| A1 | T, I, L, V, M, S | | F, W, Y |
| A2 | L, I, V, M, A, T, | | I, V, M, A, T, |
| | Q | | L |
| A3 | V, S, M, A, T, L, | | R, K |
| | I | | |
| A24 | Y, F, W, I, V, L, | | F, I, Y, W, L, |
| | M, T | | M |
| B7 | P | | V, I, L, F, M, W, |
| | | | Y, A |
| B27 | R, H, K | | F, Y, L, W, M, I, |
| | | | V, A |
| B44 | E, D | | F, W, L, I, M, V, |
| | | | A |
| B58 | A, T, S | | F, W, Y, L, I, V, |
| | | | M, A |
| B62 | Q, L, I, V, M, P | | F, W, Y, M, I, V, |
| | | | L, A |
| MOTIFS | | | |
| A1 | T, S, M | | Y |
| A1 | | D, E, A, S | Y |
| A2.1 | L, M, V, Q, I, A, | | V, L, I, M, A, T |
| | T | | |
| A3 | L, M, V, I, S, A, | | K, Y, R, H, F, A |
| | T, F, C, G, D | | |
| A11 | V, T, M, L, I, S, | | K, R, Y, H |
| | A, G, N, C, D, F | | |
| A24 | Y, F, W, M | | F, L, I, W |
| A*3101 | M, V, T, A, L, I, | | R, K |
| | S | | |
| A*3301 | M, V, A, L, F, I, | | R, K |
| | S, T | | |
| A*6801 | A, V, T, M, S, L, | | R, K |
| | I | | |
| B*0702 | P | | L, M, F, W, Y, A, |
| | | | I, V |
| B*3501 | P | | L, M, F, W, Y, I, |
| | | | V, A |
| B51 | P | | L, I, V, F, W, Y, |
| | | | A, M |
| B*5301 | P | | I, M, F, W, Y, A, |
| | | | L, V |
| B*5401 | P | | A, T, I, V, L, M, |
| | | | F, W, Y |

Bolded residues are preferred, italicized residues are tolerated: A peptide is considered motif-bearing if it has primary anchors at each primary anchor position for a motif or supermotif as specified in the above table.

[0318] Preferred amino acid residues that can serve as primary anchor residues for most Class II epitopes consist of methionine and phenylalanine in position one and V, M, S, T, A and C in position six. Tolerated amino acid residues that can occupy these positions for most Class II epitopes consist of L, I, V, W, and Y in position one and P, L and I in position six. The presence of these amino acid residues in positions one and six in Class 1 epitopes defines the HLA-DR1, 4, 7 supermotif. The HLA-DR3 binding motif is defined by preferred amino acid residues from the group consisting of L, I, V, M, F, Y and A in position one and D, E, N, Q, S and T in position four and K, R and H in position six. Other amino acid residues may be tolerated in these positions but they are not preferred. For example, analog peptides can be created by altering the presence or absence of particular residues in these primary anchor positions. Such analogs are used to modulate the binding affinity of a peptide comprising a particular motif or supermotif.

[0319] A “preferred primary anchor residue” is an anchor residue of a motif or supermotif that is associated with optimal binding. Preferred primary anchor residues are indicated in bold-face in Table 3. “Promiscuous recognition” is where a distinct peptide is recognized by the same T cell clone in the context of various HLA molecules. Promiscuous recognition or binding is synonymous with cross-reactive binding.

[0320] A “protective immune response” or “therapeutic immune response” refers to a CTL and/or an HTL response to an antigen derived from an infectious agent or a tumor antigen, which prevents or at least partially arrests or reverses disease symptoms, side effects, or progression either in part or in full. The immune response may also include an antibody response which has been facilitated by the stimulation of helper T cells.

[0321] By “ranking” the variants in a population of peptide epitopes is meant ordering each variant by its frequency of occurrence relative to the other variants.

[0322] By “regulatory sequence” is meant a polynucleotide sequence that contributes to or is necessary for the expression of an operably associated polynucleotide or polynucleotide construct in a particular host organism. The regulatory sequences that are suitable for prokaryotes, for example, include a promoter, optionally an operator sequence, and a ribosome binding site. Eukaryotic cells are known to utilize e.g., promoters, polyadenylation signals, and enhancers. In a preferred embodiment, a promoter is a CMV promoter. In less preferred embodiments, a promoter is another promoter described herein or known in the art. Regulatory sequences include IRESs. Other specific examples of regulatory sequences are described herein and otherwise known in the art.

[0323] The term “residue” refers to an amino acid or amino acid mimetic incorporated into an oligopeptide by an amide bond or amide bond mimetic.

[0324] A “secondary anchor residue” is an amino acid residue at a position other than a primary anchor position in a peptide which may influence peptide binding. A secondary anchor residue occurs at a significantly higher frequency among bound peptides than would be expected by random distribution of amino acid residues at one position.

[0325] The secondary anchor residues are said to occur at “secondary anchor positions.” A secondary anchor residue can be identified as a residue which is present at a higher frequency among high or intermediate affinity binding peptides, or a residue otherwise associated with high or intermediate affinity binding. For example, in certain embodiments of the present invention, analog peptides are created by altering the presence or absence of particular residues in one or more secondary anchor positions. Such analogs are used to finely modulate the binding affinity of a peptide comprising a particular motif or supermotif. The terminology “fixed peptide” is sometimes used to refer to an analog peptide.

[0326] “Sorting epitopes” refers to determining or designing an order of the epitopes in a multi-epitope construct according to methods of the present invention.

[0327] A “spacer” (or “spacer sequence”) refers to one or more amino acid residues (or nucleotides encoding such residues) inserted between two epitopes in a multi-epitope construct to prevent the occurrence of junctional epitopes and/or to increase the efficiency of processing. A multi-epitope construct may have one or more spacer regions. In some embodiments, a spacer region may flank each epitope-encoding nucleic acid sequence in a construct, or the ratio of spacer nucleotides to epitope-encoding nucleotides may be about 2 to 10, about 5 to 10, about 6 to 10, about 7 to 10, about 8 to 10, or about 9 to 10, where a ratio of about 8 to 10 has been determined to yield favorable results for some constructs.

[0328] The spacer nucleotides may encode one or more amino acids. A spacer nucleotide sequence flanking a class I HLA epitope in a multi-epitope construct is preferably of a length that encodes between one and about eight amino acids. A spacer nucleotide sequence flanking a class II HLA epitope in a multi-epitope construct is preferably of a length that encodes greater than five, six, seven, or more amino acids, and more preferably five or six amino acids.

[0329] The number of spacers in a construct, the number of amino acid residues in a spacer, and the amino acid composition of a spacer can be selected to optimize epitope processing and/or minimize junctional epitopes. It is preferred that spacers are selected by concomitantly optimizing epitope processing and junctional motifs. Suitable amino acids for optimizing epitope processing are described herein. Also, suitable amino acid spacing for minimizing the number of junctional epitopes in a construct are described herein for class I and class II HLAs. For example, spacers flanking class II HLA epitopes preferably include G, P, and/or N residues as these are not generally known to be primary anchor residues (see, e.g., PCT Application NO. PCT/US00/19774). A particularly preferred spacer for flanking a class II HLA epitope includes alternating G and P residues, for example, (GP)n, (PG)n, (GP)nG, (PG)nP, and so forth, where n is an integer between zero and eleven (e.g., 1, 2, 3, 4, 5, 6, 7, 8, 9, 10 or 11), preferably two or about two, and where a specific example of such a spacer is GPGPG (SEQ ID NO:______). A preferred spacer, particularly for class I HLA epitopes, comprises one, two, three or more consecutive alanine (A) residues.

[0330] In some multi-epitope constructs, it is sufficient that each spacer nucleic acid encodes the same amino acid sequence. In multi-epitope constructs having two spacer nucleic acids encoding the same amino acid sequence, the spacer nucleic acids encoding those spacers may have the same or different nucleotide sequences, where different nucleotide sequences may be preferred to decrease the likelihood of unintended recombination events when the multi-epitope construct is inserted into cells.

[0331] In other multi-epitope constructs, one or more of the spacer nucleotides may encode different amino acid sequences. While many of the spacer nucleotides may encode the same amino acid sequence in a multi-epitope construct, one, two, three, four, five or more spacer nucleotides may encode different amino acid sequences, and it is possible that all of the spacer nucleotides in a multi-epitope construct encode different amino acid sequences. Spacer nucleotides may be optimized with respect to the epitope nucleic acids they flank by determining whether a spacer sequence will maximize epitope processing and/or minimize junctional epitopes, as described herein.

[0332] In certain embodiments, multi-epitope constructs are distinguished from one another according to whether the spacers in one construct optimize epitope processing or minimize junctional epitopes with respect to another construct. In preferred embodiments, constructs are distinguished where one construct is concomitantly optimized for epitope processing and junctional epitopes with respect to one or more other constructs. Computer assisted methods and in vitro and in vivo laboratory methods for determining whether a construct is optimized for epitope processing and junctional motifs are described herein.

[0333] A “subdominant epitope” is an epitope which evokes little or no response upon immunization with whole antigens which comprise the epitope, but for which a response can be obtained by immunization with an isolated peptide, and this response (unlike the case of cryptic epitopes) is detected when whole protein is used to recall the response in vitro or in vivo.

[0334] A “supermotif” is a peptide binding specificity shared by HLA molecules encoded by two or more HLA alleles. Preferably, a supermotif-bearing peptide is recognized with high or intermediate affinity (as defined herein) by two or more HLA antigens.

[0335] “Synthetic peptide” refers to a peptide that is man-made using such methods as chemical synthesis or recombinant DNA technology.

[0336] A “tolerated primary anchor residue” is an anchor residue of a motif or supermotif that is associated with binding to a lesser extent than a preferred residue. Tolerated primary anchor residues are indicated in italicized text in Table 3.

[0337] As used herein, a “vaccine” is a composition that contains one or more peptides of the invention. There are numerous embodiments of vaccines in accordance with the invention, such as by a cocktail of one or more peptides; one or more epitopes of the invention comprised by a polyepitopic peptide; or nucleotides that encode such peptides or polypeptides, e.g., a minigene that encodes a polyepitopic peptide. The “one or more peptides” can include any whole unit integer from 1-150, e.g., at least 2, 3, 4, 5, 6, 7, 8, 9, 10, 11, 12, 13, 14, 15, 16, 17, 18, 19, 20, 21, 22, 23, 24, 25, 26, 27, 28, 29, 30, 31, 32, 33, 34, 35, 36, 37, 38, 39, 40, 41, 42, 43, 44, 45, 46, 47, 48, 49, 50, 51, 52, 53, 54, 55, 56, 57, 58, 59, 60, 61, 62, 63, 64, 65, 66, 67, 68, 69, 70, 71, 72, 73, 74, 75, 80, 85, 90, 95, 100, 105, 110, 115, 120, 125, 130, 135, 140, 145, or 150 or more peptides of the invention. The peptides or polypeptides can optionally be modified, such as by lipidation, addition of targeting or other sequences. In other embodiments, polynucleotides or minigenes of the invention are modified to include signals for targeting, processing or other sequences. HLA class I-binding peptides of the invention can be admixed with, or linked to, HLA class II-binding peptides, to facilitate activation of both cytotoxic T lymphocytes and helper T lymphocytes. Vaccines can also comprise peptide-pulsed antigen presenting cells, e.g., dendritic cells.

[0338] A “variant of a peptide epitope” refers to a peptide that is identified from a different viral strain at the same position in an aligned sequence, and that varies by one or more amino acid residues from the parent peptide epitope. Examples of peptide epitope variants of HPV include those shown in Table 9 of International Patent Application No. PCT/US04/009510, filed Mar. 29, 2004, which claims benefit of priority to U.S. Application No. 60/458,026, filed Mar. 28, 2003.

[0339] A “variant of an antigen” refers to an antigen that comprises at least one variant of a peptide epitope. Examples of antigen variants of HPV include those listed herein.

[0340] A “variant of an infectious agent” refers to an infectious agent whose genome encodes at least one variant of an antigen. Variants of infectious agents are related viral strains or isolates that comprise sequence variations, but cause some or all of the same disease symptoms. Examples of HPV infectious agents or variants include HPV strains 1-92 (preferably HPV strains 16, 18, 31, 33, 45, 52, 56, and 58).

[0341] A “TCR contact residue” or “T cell receptor contact residue” is an amino acid residues in an epitope that is understood to be bound by a T cell receptor; these are defined herein as not being any primary MHC anchor residues. T cell receptor contact residues are defined as the position/positions in the peptide where all analogs tested induce or reduce T-cell recognition relative to that induced with a wildtype peptide.

[0342] Acronyms used herein are defined as follows:

| | |
|---|---|
| APC: | Antigen presenting cell |
| CD3: | Pan T cell marker |
| CD4: | Helper T lymphocyte marker |
| CD8: | Cytotoxic T lymphocyte marker |
| CEA: | Carcinoembryonic antigen |
| CFA: | Complete Freund's Adjuvant |
| CTL: | Cytotoxic T lymphocytes |
| DC: | Dendritic cells. DC functioned as potent antigen |
| | presenting cells by stimulating cytokine release from |
| | CTL lines that were specific for a model peptide |
| | derived from hepatitis B virus (HBV). In vitro |
| | experiments using DC pulsed ex vivo with an HBV |
| | peptide epitope have stimulated CTL immune responses |
| | in vitro following delivery to naive mice. |
| DMSO: | Dimethylsulfoxide |
| ELISA: | Enzyme-linked immunosorbant assay |
| E:T: | Effector:target ratio |
| FCS: | Fetal calf serum |
| G-CSF: | Granulocyte colony-stimulating factor |
| GM-CSF: | Granulocyte-macrophage (monocyte)-colony |
| | stimulating factor |
| HBV: | Hepatitis B virus |
| HER2/Neu: | c-erbB-2 |
| HLA: | Human leukocyte antigen |
| HLA-DR: | Human leukocyte antigen class II |
| HPLC: | High Performance Liquid Chromatography |
| HPV: | Human Papillomavirus |
| HTC: | Helper T cells |
| HTL: | Helper T Lymphocyte |
| ID: | Identity |
| IFA: | Incomplete Freund's Adjuvant |
| IFNγ: | Interferon gamma |
| IL-4: | Interleukin-4 cytokine |
| IV: | Intravenous |
| LU30%: | Cytotoxic activity required to achieve 30% lysis at a |
| | 100:1 |
| | (E:T) ratio |
| MAb: | Monoclonal antibody |
| MAGE: | Melanoma antigen |
| MLR: | Mixed lymphocyte reaction |
| MNC: | Mononuclear cells |
| PB: | Peripheral blood |
| PBMC: | Peripheral blood mononuclear cell |
| SC: | Subcutaneous |
| S.E.M.: | Standard error of the mean |
| QD: | Once a day dosing |
| TAA: | Tumor associated antigen |
| TCR: | T cell receptor |
| TNF: | Tumor necrosis factor |
| WBC: | White blood cells |

Stimulation of CTL and HTL Responses

[0343] The mechanism by which T cells recognize antigens has begun to be thoroughly delineated during the past fifteen years. Based on our understanding of the immune system we have developed efficacious peptide epitope vaccine compositions that can induce a therapeutic or prophylactic immune response to HPV in a broad population. For an understanding of the value and efficacy of the claimed compositions, a brief review of immunology-related technology is provided.

[0344] A complex of an HLA molecule and a peptide antigen acts as the ligand recognized by HLA-restricted T cells (Buus, S. et al., Cell 47:1071, 1986; Babbitt, B. P. et al., Nature 317:359, 1985; Townsend, A. and Bodmer, H., Ann. Rev. Immunol. 7:601, 1989; Germain, R. N., Ann. Rev. Immunol. 11:403, 1993). Through the study of single amino acid substituted antigen analogs and the sequencing of endogenously bound, naturally processed peptides, critical residues that correspond to motifs required for specific binding to HLA antigen molecules have been identified (see e.g., Southwood, et al., J. Immunol. 160:3363-3373 (1998); Rammensee, et al., Immunogenetics 41:178 (1995); Rammensee et al., Sette, A. and Sidney, J. Curr. Opin. Immunol. 10:478 (1998); Engelhard, V. H., Curr. Opin. Immunol. 6:13 (1994); Sette, A. and Grey, H. M., Curr. Opin. Immunol. 4:79 (1992); Sinigaglia, F. and Hammer, J. Curr. Biol. 6:52 (1994); Ruppert et al., Cell 74:929-937 (1993); Kondo et al., J. Immunol. 155:4307-4312 (1995); Sidney et al., J. Immunol. 157:3480-90 (1996); Sidney et al., Human Immunol. 45:79-93 (1996); Sette, A. and Sidney, J. Immunogenetics 50(3-4):201-212 (1999) Review).

[0345] Furthermore, x-ray crystallographic analysis of HLA-peptide complexes has revealed pockets within the peptide binding cleft of HLA molecules which accommodate, in an allele-specific mode, residues borne by peptide ligands; these residues in turn determine the HLA binding capacity of the peptides in which they are present. (See, e.g., Madden, D. R. Annu. Rev. Immunol. 13:587, 1995; Smith, et al., Immunity 4:203, 1996; Fremont et al., Immunity 8:305, 1998; Stern et al., Structure 2:245, 1994; Jones, E. Y. Curr. Opin. Immunol. 9:75, 1997; Brown, J. H. et al., Nature 364:33, 1993; Guo, H. C. et al., Proc. Natl. Acad. Sci. USA 90:8053, 1993; Guo, H. C. et al., Nature 360:364, 1992; Silver, M. L. et al., Nature 360:367, 1992; Matsumura, M. et al., Science 257:927, 1992; Madden et al., Cell 70:1035, 1992; Fremont, D. H. et al., Science 257:919, 1992; Saper, M. A., Bjorkman, P. J. and Wiley, D. C., J. Mol. Biol. 219:277, 1991.)

[0346] Accordingly, the definition of class I and class II allele-specific HLA binding motifs, or class I or class II supermotifs allows identification of regions within a protein that have the potential of binding particular HLA antigen(s).

[0347] The present inventors have found that the correlation of binding affinity with immunogenicity, which is disclosed herein, is an important factor to be considered when evaluating candidate peptides. Thus, by a combination of motif searches, HLA-peptide binding assays, and in vivo immunogenicity analyses, candidates for epitope-based vaccines have been identified. After determining their binding affinity, additional confirmatory work can be performed to select, among these vaccine candidates, epitopes with preferred characteristics in terms of population coverage, antigenicity, and immunogenicity.

[0348] Various strategies can be utilized to evaluate immunogenicity, including, by non-limiting example, the following:

[0349] (1) Evaluation of primary T cell cultures from normal individuals (see, e.g., Wentworth, P. A. et al., Mol. Immunol. 32:603, 1995; Celis, E. et al., Proc. Natl. Acad. Sci. USA 91:2105, 1994; Tsai, V. et al., J. Immunol. 158:1796, 1997; Kawashima, I. et al., Human Immunol. 59:1, 1998); This procedure involves the stimulation of peripheral blood lymphocytes (PBL) from normal subjects with a test peptide in the presence of antigen presenting cells in vitro over a period of several weeks. T cells specific for the peptide become activated during this time and are detected using, e.g., a lymphokine- or ⁵¹Cr-release assay involving peptide sensitized target cells.

[0350] (2) Immunization of HLA transgenic mice (see, e.g., Wentworth, P. A. et al., J. Immunol. 26:97, (1996); Wentworth, P. A. et al., Int. Immunol. 8:651, (1996); Alexander, J. et al., J. Immunol. 159:4753, (1997); McKinney, D., et al., J. Immunol. Methods 237:105-17 (2000)). In this method, peptides in incomplete Freund's adjuvant are administered subcutaneously to HLA transgenic mice. Several weeks following immunization, splenocytes are removed and cultured in vitro in the presence of test peptide for approximately one week. Peptide-specific T cells are detected using, e.g., a lymphokine or ⁵¹Cr-release assay involving peptide sensitized target cells and target cells expressing endogenously generated antigen.

[0351] (3) Demonstration of recall T cell responses from immune individuals who have effectively been vaccinated, recovered from infection, and/or from chronically infected patients (see, e.g., Rehermann, B. et al., J. Exp. Med. 181:1047, 1995; Doolan, D. L. et al., Immunity 7:97, 1997; Bertoni, R. et al., J. Clin. Invest. 100:503, 1997; Threlkeld, S. C. et al., J. Immunol. 159:1648, 1997; Diepolder, H. M. et al., J. Virol. 71:6011, 1997); In applying this strategy, recall responses are detected by culturing PBL from subjects that have been naturally exposed to the antigen, for instance through infection, and thus have generated an immune response “naturally”, or from patients who were vaccinated against the infection. PBL from subjects are cultured in vitro for 1 day to 2 weeks in the presence of test peptide plus antigen presenting cells (APC) to allow activation of “memory” T cells, as compared to “naive” T cells. At the end of the culture period, T cell activity is detected using assays for T cell activity including ⁵¹Cr release involving peptide-sensitized targets, T cell proliferation, or lymphokine release.

Binding Affinity of Peptide Epitopes for HLA Molecules

[0352] As indicated herein, the large degree of HLA polymorphism is an important factor to be taken into account with the epitope-based approach to vaccine development. To address this factor, epitope selection encompassing identification of peptides capable of binding at high or intermediate affinity to multiple HLA molecules is preferably utilized, most preferably these epitopes bind at high or intermediate affinity to two or more allele-specific HLA molecules.

[0353] CTL-inducing peptides of interest for vaccine compositions preferably include those that have an IC₅₀ or binding affinity value for class I HLA molecules of 500 nM or better (i.e., the value is ≦500 nM). HTL-inducing peptides preferably include those that have an IC₅₀ or binding affinity value for class II HLA molecules of 1000 nM or better, (i.e., the value is ≦1,000 nM). For example, peptide binding is assessed by testing the capacity of a candidate peptide to bind to a purified HLA molecule in vitro. Peptides exhibiting high or intermediate affinity are then considered for further analysis. Selected peptides are tested on other members of the supertype family. In preferred embodiments, peptides that exhibit cross-reactive binding are then used in cellular screening analyses or vaccines.

[0354] As disclosed herein, higher HLA binding affinity is correlated with greater immunogenicity. Greater immunogenicity can be manifested in several different ways. Immunogenicity corresponds to whether an immune response is elicited at all, and to the vigor of any particular response, as well as to the extent of a population in which a response is elicited. For example, a peptide might elicit an immune response in a diverse array of the population, yet in no instance produce a vigorous response. In accordance with these principles, close to 90% of high binding peptides have been found to be immunogenic, as contrasted with about 50% of the peptides which bind with intermediate affinity. Moreover, higher binding affinity peptides lead to more vigorous immunogenic responses. As a result, less peptide is required to elicit a similar biological effect if a high affinity binding peptide is used. Thus, in preferred embodiments of the invention, high affinity binding epitopes are particularly useful.

[0355] The relationship between binding affinity for HLA class I molecules and immunogenicity of discrete peptide epitopes on bound antigens has been determined for the first time in the art by the present inventors. The correlation between binding affinity and immunogenicity was analyzed in two different experimental approaches (see, e.g., Sette, et al., J. Immunol. 153:5586-92, 1994). In the first approach, the immunogenicity of potential epitopes ranging in HLA binding affinity over a 10,000-fold range was analyzed in HLA-A*0201 transgenic mice. In the second approach, the antigenicity of approximately 100 different hepatitis B virus (HBV)-derived potential epitopes, all carrying A*0201 binding motifs, was assessed by using PBL from acute hepatitis patients. Pursuant to these approaches, it was determined that an affinity threshold value of approximately 500 nM (preferably 50 nM or less) determines the capacity of a peptide epitope to elicit a CTL response. These data are true for class I binding affinity measurements for naturally processed peptides and for synthesized T cell epitopes. These data also indicate the important role of determinant selection in the shaping of T cell responses (see, e.g., Schaeffer, et al. Proc. Natl. Acad. Sci. USA 86:4649-53, 1989).

[0356] An affinity threshold associated with immunogenicity in the context of HLA class II DR molecules has also been delineated (see, e.g., Southwood, et al. J. Immunology 160:3363-3373 (1998), and U.S. Pat. No. 6,413,517; each of which is hereby incorporated by reference in its entirety). In order to define a biologically significant threshold of DR binding affinity, a database of the binding affinities of 32 DR-restricted epitopes for their restricting element (i.e., the HLA molecule that binds the motif) was compiled. In approximately half of the cases (15 of 32 epitopes), DR restriction was associated with high binding affinities, i.e. binding affinity values of 100 nM or less. In the other half of the cases (16 of 32), DR restriction was associated with intermediate affinity (binding affinity values in the 100-1,000 nM range). In only one of 32 cases was DR restriction associated with an IC₅₀ of 1,000 nM or greater. Thus, 1,000 nM can be defined as an affinity threshold associated with immunogenicity in the context of DR molecules.

[0357] In the case of tumor-associated antigens (TAAs), many CTL peptide epitopes that have been shown to induce CTL that lyse peptide-pulsed target cells and tumor cell targets endogenously expressing the epitope exhibit binding affinity or IC₅₀ values of 200 nM or less. In a study that evaluated the association of binding affinity and immunogenicity of a small set of such TAA epitopes, 100% (i.e., 10 out of 10) of the high binders, i.e., peptide epitopes binding at an affinity of 50 nM or less, were immunogenic and 80% (i.e., 8 out of 10) of them elicited CTLs that specifically recognized tumor cells. In the 51 to 200 nM range, very similar figures were obtained. With respect to analog peptides, CTL inductions positive for wildtype peptide and tumor cells were noted for 86% (i.e., 6 out of 7) and 71% (i.e., 5 out of 7) of the peptides, respectively. In the 201-500 nM range, most peptides (i.e., 4 out of 5 wildtype) were positive for induction of CTL recognizing wildtype peptide, but tumor recognition was not detected.

[0358] The binding affinity of peptides for HLA molecules can be determined as described in Example 1, below.

Peptide Epitope Binding Motifs and Supermotifs

[0359] Through the study of single amino acid substituted antigen analogs and the sequencing of endogenously bound, naturally processed peptides, critical residues required for allele-specific binding to HLA molecules have been identified. The presence of these residues correlates with binding affinity for HLA molecules. The identification of motifs and/or supermotifs that correlate with high and intermediate affinity binding is an important issue with respect to the identification of immunogenic peptide epitopes for the inclusion in a vaccine. Kast, et al. (J. Immunol. 152:3904-3912, 1994) have shown that motif-bearing peptides account for 90% of the epitopes that bind to allele-specific HLA class I molecules. In this study all possible peptides of 9 amino acids in length and overlapping by eight amino acids (240 peptides), which cover the entire sequence of the E6 and E7 proteins of human papillomavirus type 16, were evaluated for binding to five allele-specific HLA molecules that are expressed at high frequency among different ethnic groups. This unbiased set of peptides allowed an evaluation of the predictive value of HLA class I motifs. From the set of 240 peptides, 22 peptides were identified that bound to an allele-specific HLA molecule with high or intermediate affinity. Of these 22 peptides, 20 (i.e. 91%) were motif-bearing. Thus, this study demonstrates the value of motifs for the identification of peptide epitopes for inclusion in a vaccine: application of motif-based identification techniques will identify about 90% of the potential epitopes in a target antigen protein sequence. Such peptide epitopes are identified in Tables 13-24 described below.

[0360] Peptides of the present invention may also comprise epitopes that bind to MHC class II DR molecules. Such peptide epitopes are identified in Tables 13-24 described below. A greater degree of heterogeneity in both size and binding frame position of the motif, relative to the N- and C-termini of the peptide, exists for class II peptide ligands. This increased heterogeneity of HLA class II peptide ligands is due to the structure of the binding groove of the HLA class II molecule which, unlike its class I counterpart, is open at both ends. Crystallographic analysis of HLA class II DRB*0101-peptide complexes showed that the major energy of binding is contributed by peptide residues complexed with complementary pockets on the DRB*0101 molecules. An important anchor residue engages the deepest hydrophobic pocket (see, e.g., Madden, D. R. Ann. Rev. Immunol. 13:587, 1995) and is referred to as position 1 (P1). P1 may represent the N-terminal residue of a class II binding peptide epitope, but more typically is flanked towards the N-terminus by one or more residues. Other studies have also pointed to an important role for the peptide residue in the sixth position towards the C-terminus, relative to P1, for binding to various DR molecules.

[0361] In the past few years evidence has accumulated to demonstrate that a large fraction of HLA class I and class II molecules can be classified into a relatively few supertypes, each characterized by largely overlapping peptide binding repertoires, and consensus structures of the main peptide binding pockets. Thus, peptides of the present invention are identified by any one of several HLA-specific amino acid motifs (see, e.g., Tables 13-24), or if the presence of the motif corresponds to the ability to bind several allele-specific HLA antigens, a supermotif. The HLA molecules that bind to peptides that possess a particular amino acid supermotif are collectively referred to as an HLA “supertype.” A recitation of motifs that are encompassed by supermotifs of the invention is provided in Table 4.

TABLE 4
Allelle-specific HLA-supertype members

| HLA- | | |
|---|---|---|
| supertype | Verified^{a} | Predicted^{b} |
| A1 | A*0101, A*2501, A*2601, | A*0102, A*2604, A*3601, |
| | A*2602, A*3201 | A*4301, A*8001 |
| A2 | A*0201, A*0202, A*0203, | A*0208, A*0210, A*0211, |
| | A*0204, A*0205, A*0206, | A*0212, A*0213 |
| | A*0207, A*0209, A*0214, | |
| | A*6802, A*6901 | |
| A3 | A*0301, A*1101, A*3101, | A*0302, A*1102, A*2603, |
| | A*3301, A*6801 | A*3302, A*3303, A*3401, |
| | | A*3402, A*6601, A*6602, |
| | | A*7401 |
| A24 | A*2301, A*2402, A*3001 | A*2403, A*2404, A*3002, |
| | | A*3003 |
| B7 | B*0702, B*0703, B*0704, | B*1511, B*4201, B*5901 |
| | B*0705, B*1508, B*3501, | |
| | B*3502, B*3503, B*3503, | |
| | B*3504, B*3505, B*3506, | |
| | B*3507, B*3508, B*5101, | |
| | B*5102, B*5103, B*5104, | |
| | B*5105, B*5301, B*5401, | |
| | B*5501, B*5502, B*5601, | |
| | B*5602, B*6701, B*7801 | |
| B27 | B*1401, B*1402, B*1509, | B*2701, B*2707, B*2708, |
| | B*2702, B*2703, B*2704, | B*3802, B*3903, B*3904, |
| | B*2705, B*2706, B*3801, | B*3905, B*4801, B*4802, |
| | B*3901, B*3902, B*7301 | B*1510, B*1518, B*1503 |
| B44 | B*1801, B*1802, B*3701, | B*4101, B*4501, B*4701, |
| | B*4402, B*4403, B*4404, | B*4901, B*5001 |
| | B*4001, B*4002, B*4006 | |
| B58 | B*5701, B*5702, B*5801, | |
| | B*5802, B*1516, B*1517 | |
| B62 | B*1501, B*1502, B*1513, | B*1301, B*1302, B*1504, |
| | B*5201 | B*1505, B*1506, B*1507, |
| | | B*1515, B*1520, B*1521, |
| | | B*1512, B*1514, B*1510 |

^{a}Verified alleles include alleles whose specificity has been determined by pool sequencing analysis, peptide binding assays, or by analysis of the sequences of CTL epitopes.
^{b}Predicted alleles are alleles whose specificity is predicted on the basis of B and F pocket structure to overlap with the supertype specificity.

[0362] The peptide motifs and supermotifs described below, and summarized in Table 4, provide guidance for the identification and use of peptide epitopes, in accordance with the invention.

[0363] Examples of peptide epitopes bearing a respective supermotif or motif are included in Tables 13-24 as designated in the description of each motif or supermotif below. The Tables include a binding affinity ratio listing for some of the peptide epitopes. The ratio may be converted to IC₅₀ by using the following formula: IC₅₀ of the standard peptide/ratio=IC₅₀ of the test peptide (i.e., the peptide epitope). The IC₅₀ values of standard peptides used to determine binding affinities for Class I peptides are shown below in Table 5. Under each supertype, the prototype allele is shown in bold. The IC₅₀ values of standard peptides used to determine binding affinities for Class II peptides are shown below in Table 6.

TABLE 5

| | | | | |
|---|---|---|---|---|
| | | | | Standard |
| | | Peptide | | Peptide IC₅₀ |
| Supertype | Allele | Sequence | SEQ ID NO | (nM) |

| | | | |
|---|---|---|---|
| A01 | A*0101 | YTAVVPLVY | 5 |
| | A*2601 | ETFGFEIQSY | 1 |
| | A*2902 | YTAVVPLVY | 5 |
| | A*3002 | RISGVDRYY | 3 |
| A02 | A*0201 | FLPSDYFPSV | 5 |
| | A*0202 | FLPSDYFPSV | 4.3 |
| | A*0203 | FLPSDYFPSV | 10 |
| | A*0206 | FLPSDYFPSV | 3.7 |
| | A*6802 | YVIKVSARV | 8 |
| A03, A11 | A*0301 | KVFPYALINK | 11 |
| | A*1101 | AVDLYHFLK | 6 |
| | A*3101 | KVFPYALINK | 18 |
| | A*3301 | ILYKRETTR | 29 |
| | A*6801 | KVFPYALINK | 8 |
| A24 | A*2301 | AYIDNYNKF | 4.9 |
| | A*2402 | AYIDNYNKF | 6 |
| | A*2902 | YTAVVPLVY | 5 |
| | A*3002 | RISGVDRYY | 3 |
| B07 | B*0702 | APRTLVYLL | 5.5 |
| | B*3501 | FPFKYAAAF | 7.2 |
| | B*5101 | FPFKYAAAF | 5.5 |
| | B*5301 | FPFKYAAAF | 9.3 |
| | B*5401 | FPFKYAAAF | 10 |
| B44 | B*1801 | SEIDLILGY | 3.1 |
| | B*4001 | YEFLQPILL | 1.6 |
| | B*4002 | YEFLQPILL | 1.7 |
| | B*4402 | SEIDLILGY | 9.2 |
| | B*4403 | SEIDLILGY | 6.8 |
| | B*4501 | AEFKYIAAV | 4.9 |

[0364] TABLE 6

| | | | | |
|---|---|---|---|---|
| | | | SEQ | Standard |
| | | | ID | Peptide IC₅₀ |
| Antigen | Allele | Peptide Sequence | NO | (nM) |

| | | | |
|---|---|---|---|
| DR1 | DRB1*0101 | PKYVKQNTLKLAT | 5 |
| DR3 | DRB1*0301 | YKTIAFDEEARR | 90 |
| DR4 | DRB1*0401 | YARFQSQTTLKQKT | 8 |
| DR4 | DRB1*0404 | YARFQSQTTLKQKT | 20 |
| DR4 | DRB1*0405 | YARFQSQTTLKQKT | 38 |
| DR7 | DRB1*0701 | PKYVKQNTIKLAT | 25 |
| DR8 | DRB1*0802 | KSKYKLATSVLAGLL | 49 |
| DR9 | DRB1*0901 | AKFVAAWTLKAAA | 75 |
| DR11 | DRB1*1101 | PKFVKQNTLKGAT | 20 |
| DR12 | DRB1*1201 | EALIHQLKLNPYVLS | 45 |
| DR13 | DRB1*1302 | QYIKANAKFIGITE | 3.5 |
| DR15 | DRB1*1501 | GRTQDENPVVHFFKNI | 9.1 |
| | | VTPRTPPP | |
| DR52 | DRB3*0101 | NGQIGNDPNRDIL | 100 |
| DR53 | DRB4*0101 | YARFQSQTTLKQKT | 58 |
| DR51 | DRB5*0101 | AKFVAAWTLKAAA | 20 |
| DQ | DQB1*0201 | YPFIEQEGPEFFDQE | 25 |
| DQ | DQB1*0301 | YAHAAHAAHAAHAAH | 21 |
| | | AA | |
| DQ | DQB1*0302 | EEDIEIIPIQEEEY | 21 |

[0365] For example, where an HLA-A2.1 motif-bearing peptide shows a relative binding ratio of 0.01 for HLA-A*0201, the IC₅₀ value is 500 nM, and where an HLA-A2.1 motif-bearing peptide shows a relative binding ratio of 0.1 for HLA-A*0201, the IC₅₀ value is 50 nM. The peptides used as standards for the binding assays described herein are examples of standards; alternative standard peptides can also be used when performing binding studies.

[0366] To obtain the peptide epitope sequences listed in Tables 13-24, protein sequence data for HPV types 6a, 6b, 11a, 16, 18, 31, 33, 45, 52, 56, and 58 were evaluated for the presence of the designated supermotif or motif. Seven HPV structural and regulatory proteins, E1, E2, E5, E6, E7, L1 and L2 were included in the analysis. E4 was also included in the evaluation of some of the strains. Peptide epitopes can additionally be evaluated on the basis of their conservancy (i.e., the amount of variance) among the available protein sequences for each HPV antigen.

[0367] In the Tables, motif- and/or supermotif-bearing amino acid sequences identified in the indicated HPV strains are designated by position number and length of the epitope with reference to the HPV sequences and numbering provided below. For each sequence, the following information is provided: Column 1 (labeled “Peptide”) recites a Peptide No. (internal identification number); Column 2 (labeled “Sequence”) recites the peptide epitope amino acid sequence; Column 3 (labeled “Source”) recites the HPV Type, the protein in which the motif-bearing sequence is found, and the amino acid number of the first residue in the motif-bearing sequence, e.g., “HPV16.E1.163” indicates that the peptide epitope is obtained from HPV Type 16, protein E1, beginning at position 163 of this protein; Column 4 (labeled “xxx PIC” wherein xxx is the HLA allele recited in the title of the Table) recites the predictive IC₅₀ binding value (“PIC”) of the motif-bearing sequence; Column 5 (labeled “Len”) indicates the length of the peptide sequence, e.g., “9” indicates that the peptide comprises 9 amino acid residues; all remaining Columns, excluding the final column, indicate the IC₅₀ binding value of each peptide epitope; the final Column (labeled “Degeneracy”) indicates the number of HLA alleles analyzed to which the peptide epitope is characterized as a “strong binder.” Amino acid substitutions made within a peptide epitope can also be indicated, i.e. “HPV.E6.29 L2” indicates that a Leucine is at position 2 within the epitope.

[0368] For HPV strain 11, the number and position listed for protein E5 refers to either the HPV11 E5a or HPV11 E5b sequence set out below. Because the epitope must include the designated motif or supermotif, e.g., HLA-A2, it can readily be determined whether the sequence refers to HPV11 E5a or E5b by checking the amino acid sequences of both E5a and E5b and selecting the sequence that conforms to the motif listed in Table 3.

HLA-A1 Supermotif and HLA-A1 Motif

[0369] The HLA-A1 supermotif is characterized by the presence in peptide ligands of a small (T or S) or hydrophobic (L, I, V, or M) primary anchor residue in position 2, and an aromatic (Y, F, or W) primary anchor residue at the C-terminal position of the epitope. The corresponding family of HLA molecules that bind to the A1 supermotif (i.e., the HLA-A1 supertype) is comprised of at least A*0101, A*2601, A*2602, A*2501, and A*3201 (see, e.g., DiBrino, M. et al., J. Immunol. 151:5930, 1993; DiBrino, M. et al., J. Immunol. 152:620, 1994; Kondo, A. et al., Immunogenetics 45:249, 1997). Other allele-specific HLA molecules predicted to be members of the A1 superfamily are shown in Table 4. Peptides binding to each of the individual HLA proteins can be modulated by substitutions at primary and/or secondary anchor positions, preferably choosing respective residues specified for the supermotif.

[0370] The HLA-A1 motif is characterized by the presence in peptide ligands of T, S, or M as a primary anchor residue at position 2 and the presence of Y as a primary anchor residue at the C-terminal position of the epitope. An alternative allele-specific A1 motif is characterized by a primary anchor residue at position 3 rather than position 2. This motif is characterized by the presence of D, E, A, or S as a primary anchor residue in position 3, and a Y as a primary anchor residue at the C-terminal position of the epitope (see, e.g., DiBrino et al., J. Immunol., 152:620, 1994; Kondo et al., Immunogenetics 45:249, 1997; and Kubo et al., J. Immunol. 152:3913, 1994 for reviews of relevant data). Peptide binding to HLA A1 can be modulated by substitutions at primary and/or secondary anchor positions, preferably choosing respective residues specified for the motif.

[0371] Representative peptide epitopes from the HPV E1 and E2 proteins that comprise the A1 supermotif; a subset of which comprise either one or both of the two A1 motifs referenced above, are set forth in Table 13. Representative peptide epitopes from the HPV E6 and E7 proteins that comprise the A1 supermotif; a subset of which comprise either one or both of the two A1 motifs referenced above, are set forth in Table 14.

HLA-A2 Supermotif and HLA-A2*0201 Motif

[0372] Primary anchor specificities for allele-specific HLA-A2.1 molecules (see, e.g., Falk, et al., Nature 351:290-96, 1991; Hunt, et al., Science 255:1261-63, 1992; Parker, et al., J. Immunol. 149:3580-87, 1992; Ruppert, et al., Cell 74:929-37, 1993) and cross-reactive binding among HLA-A2 and -A28 molecules have been described. (See, e.g., Fruci, et al., Human Immunol. 38:187-92, 1993; Tanigaki, et al., Human Immunol. 39:155-62, 1994; Del Guercio, et al., J. Immunol. 154:685-93, 1995; Kast, et al., J. Immunol. 152:3904-12, 1994, for reviews of relevant data.) These primary anchor residues define the HLA-A2 supermotif; which presence in peptide ligands corresponds to the ability to bind several different HLA-A2 and -A28 molecules. The HLA-A2 supermotif comprises peptide ligands with L, I, V, M, A, T, or Q as a primary anchor residue at position 2 and L, I, V, M, A, or T as a primary anchor residue at the C-terminal position of the epitope.

[0373] The corresponding family of HLA molecules (i.e., the HLA-A2 supertype that binds these peptides) is comprised of at least: A*0201, A*0202, A*0203, A*0204, A*0205, A*0206, A*0207, A*0209, A*0214, A*6802, and A*6901. Other allele-specific HLA molecules predicted to be members of the A2 superfamily are shown in Table 4. As explained in detail below, binding to each of the individual allele-specific HLA molecules can be modulated by substitutions at the primary anchor and/or secondary anchor positions, preferably choosing respective residues specified for the supermotif.

[0374] An HLA-A2*0201 motif was determined to be characterized by the presence in peptide ligands of L or M as a primary anchor residue in position 2, and L or V as a primary anchor residue at the C-terminal position of a 9-residue peptide (see, e.g., Falk, et al., Nature 351:290-296, 1991) and was further found to comprise an I at position 2 and I or A at the C-terminal position of a nine amino acid peptide (see, e.g., Hunt, et al., Science 255:1261-63, 1992; Parker, et al., J. Immunol. 149:3580-3587, 1992). The A*0201 allele-specific motif has also been defined by the present inventors to additionally comprise V, A, T, or Q as a primary anchor residue at position 2, and M or T as a primary anchor residue at the C-terminal position of the epitope (see, e.g., Kast et al., J. Immunol. 152:3904-3912, 1994). Thus, the HLA-A*0201 motif comprises peptide ligands with L, I, V, M, A, T, or Q as primary anchor residues at position 2 and L, I, V, M, A, or T as a primary anchor residue at the C-terminal position of the epitope. The preferred and tolerated residues that characterize the primary anchor positions of the HLA-A*0201 motif are identical to the residues describing the A2 supermotif. (For reviews of relevant data, see, e.g., Del Guercio, et al., J. Immunol. 154:685-93, 1995; Ruppert, et al., Cell 74:929-37, 1993; Sidney, et al., Immunol. Today 17:261-66, 1996; Sette and Sidney, Curr. Opin. in Immunol. 10:478-82, 1998). Secondary anchor residues that characterize the A*0201 motif have additionally been defined (see, e.g., Ruppert, et al., Cell 74:929-937, 1993). Peptide binding to HLA-A*0201 molecules can be modulated by substitutions at primary and/or secondary anchor positions, preferably choosing respective residues specified for the motif.

[0375] Representative peptide epitopes from the HPV E1 and E2 proteins that comprise an A2 supermotif; a subset of which also comprise an A*0201 motif, are set forth in Table 15. Representative peptide epitopes from the HPV E6 and E7 proteins that comprise an A2 supermotif; a subset of which also comprise an A*0201 motif, are set forth in Table 16. The motifs comprising the primary anchor residues V, A, T, or Q at position 2 and L, I, V, A, or T at the C-terminal position are those most particularly relevant to the invention claimed herein.

HLA-A3 Supermotif, the HLA-A3 Motif, and the HLA-A11 Motif

[0376] The HLA-A3 supermotif is characterized by the presence in peptide ligands of A, L, I, V, M, S, or, T as a primary anchor at position 2, and a positively charged residue, R or K, at the C-terminal position of the epitope, e.g., in position 9 of 9-mers (see, e.g., Sidney, et al., Hum. Immunol. 45:79, 1996). Exemplary members of the corresponding family of HLA molecules (the HLA-A3 supertype) that bind the A3 supermotif include at least A*0301, A*1101, A*3101, A*3301, and A*6801. Other allele-specific HLA molecules predicted to be members of the A3 supertype are shown in Table 4. As explained in detail below, peptide binding to each of the individual allele-specific HLA proteins can be modulated by substitutions of amino acids at the primary and/or secondary anchor positions of the peptide, preferably choosing respective residues specified for the supermotif.

[0377] The HLA-A3 motif is characterized by the presence in peptide ligands of L, M, V, I, S, A, T, F, C, G, or D as a primary anchor residue at position 2, and the presence of K, Y, R, H, F, or A as a primary anchor residue at the C-terminal position of the epitope (see, e.g., DiBrino, et al., Proc. Natl. Acad. Sci USA 90:1508, 1993; and Kubo, et al., J. Immunol. 152:3913-24, 1994). Peptide binding to HLA-A3 can be modulated by substitutions at primary and/or secondary anchor positions, preferably choosing respective residues specified for the motif.

[0378] The HLA-A11 motif is characterized by the presence in peptide ligands of V, T, M, L, I, S, A, G, N, C, D, or F as a primary anchor residue in position 2, and K, R, Y, or H as a primary anchor residue at the C-terminal position of the epitope (see, e.g., Zhang, et al., Proc. Natl. Acad. Sci USA 90:2217-21, 1993; and Kubo, et al., J. Immunol. 152:3913-24, 1994). Peptide binding to HLA-A11 can be modulated by substitutions at primary and/or secondary anchor positions, preferably choosing respective residues specified for the motif.

[0379] Representative peptide epitopes from the HPV E1 and E2 proteins that comprise the A3 supermotif, a subset of which comprise the A3 motif and/or the A11 motif, are set forth in Table 17. Representative peptide epitopes from the HPV E6 and E7 proteins that comprise the A3 supermotif, a subset of which comprise the A3 motif and/or the A11 motif, are set forth in Table 18. The A3 supermotif primary anchor residues comprise a subset of the A3- and A11-allele specific motif primary anchor residues. Representative peptide epitopes that comprise the A3 and A11 motifs are set forth in Tables 17-18 because of the extensive overlap between the A3 and A11 motif primary anchor specificities.

HLA-A24 Supermotif and the HLA-A24 Motif

[0380] The HLA-A24 supermotif is characterized by the presence in peptide ligands of an aromatic (F, W, or Y) or hydrophobic aliphatic (L, I, V, M, or T) residue as a primary anchor in position 2, and Y, F, W, L, I, or M as primary anchor at the C-terminal position of the epitope (see, e.g., Sette and Sidney, Immunogenetics 1999 November; 50(3-4):201-12, Review). The corresponding family of HLA molecules that bind to the A24 supermotif (i.e., the A24 supertype) includes at least A*2402, A*3001, and A*2301. Other allele-specific HLA molecules predicted to be members of the A24 supertype are shown in Table 4. Peptide binding to each of the allele-specific HLA molecules can be modulated by substitutions at primary and/or secondary anchor positions, preferably choosing respective residues specified for the supermotif.

[0381] The HLA-A24 motif is characterized by the presence in peptide ligands of Y, F, W, or M as a primary anchor residue in position 2, and F, L, I, or W as a primary anchor residue at the C-terminal position of the epitope (see, e.g., Kondo, et al., J. Immunol. 155:4307-12, 1995; and Kubo, et al., J. Immunol. 152:3913-24, 1994). Peptide binding to HLA-A24 molecules can be modulated by substitutions at primary and/or secondary anchor positions; preferably choosing respective residues specified for the motif.

[0382] Representative peptide epitopes from the HPV E1 and E2 proteins that comprise the A24 Supermotif, a subset of which comprise the A24 motif, are set forth in Table 19. Representative peptide epitopes from the HPV E6 and E7 proteins that comprise the A24 Supermotif, a subset of which comprise the A24 motif, are set forth in Table 20.

HLA-B7 Supermotif

[0383] The HLA-B7 supermotif is characterized by peptides bearing proline in position 2 as a primary anchor, and a hydrophobic or aliphatic amino acid (L, I, V, M, A, F, W, or Y) as the primary anchor at the C-terminal position of the epitope. The corresponding family of HLA molecules that bind the B7 supermotif (i.e., the HLA-B7 supertype) is comprised of at least twenty six HLA-B proteins including: B*0702, B*0703, B*0704, B*0705, B*1508, B*3501, B*3502, B*3503, B*3504, B*3505, B*3506, B*3507, B*3508, B*5101, B*5102, B*5103, B*5104, B*5105, B*5301, B*5401, B*5501, B*5502, B*5601, B*5602, B*6701, and B*7801 (see, e.g., Sidney, et al., J. Immunol. 154:247, 1995; Barber, et al., Curr. Biol. 5:179, 1995; Hill, et al., Nature 360:434, 1992; Rammensee, et al., Immunogenetics 41:178, 1995, for reviews of relevant data). Other allele-specific HLA molecules predicted to be members of the B7 supertype are shown in Table 4. As explained in detail below, peptide binding to each of the individual allele-specific HLA proteins can be modulated by substitutions at the primary and/or secondary anchor positions of the peptide, preferably choosing respective residues specified for the supermotif.

[0384] Representative peptide epitopes from the HPV E6 and E7 proteins that comprise the B7 supermotif are set forth in Table 21.

HLA-B44 Supermotif

[0385] The HLA-B44 supermotif is characterized by the presence in peptide ligands of negatively charged (D or E) residues as a primary anchor in position 2, and hydrophobic residues (F, W, Y, L, I, M, V, or A) as a primary anchor at the C-terminal position of the epitope (see, e.g., Sidney, et al., Immunol. Today 17:261, 1996). Exemplary members of the corresponding family of HLA molecules that bind to the B44 supermotif (i.e., the B44 supertype) include at least: B*1801, B*1802, B*3701, B*4001, B*4002, B*4006, B*4402, B*4403, and B*4006. Other allele-specific HLA molecules predicted to be members of the B44 supertype are shown in Table 4. Peptide binding to each of the allele-specific HLA molecules can be modulated by substitutions at primary and/or secondary anchor positions; preferably choosing respective residues specified for the supermotif.

[0386] Representative peptide epitopes from the HPV E6 and E7 proteins that comprise the B44 supermotif are set forth in Table 22.

HLA DR-1-4-7 Supermotif and HLA DR-3 Motif

[0387] Motifs have also been identified for peptides that bind to three common HLA class II allele-specific HLA molecules: HLA DRB1*0401, DRB1*0101, and DRB1*0701 (see, e.g., Southwood, et al., J. Immunology 160:3363-3373 (1998)). Collectively, the common residues from these motifs delineate the HLA DR-1-4-7 supermotif. Peptides that bind to these DR molecules carry a supermotif characterized by a large aromatic or hydrophobic residue (Y, F, W, L, I, V, or M) as a primary anchor residue in position 1, and a small, non-charged residue (S, T, C, A, P, V, I, L, or M) as a primary anchor residue in position 6 of a 9-mer core region. Allele-specific secondary effects and secondary anchors for each of these HLA types have also been identified (Southwood, et al., J. Immunol. 160:3363-3373 (1998)). These are set forth in Tables 7, 8, and 9. Peptide binding to HLA-DRB1*0401, DRB1*0101, and/or DRB1*0701 can be modulated by substitutions at primary and/or secondary anchor positions, preferably choosing respective residues specified for the supermotif.

TABLE 7

[chemical structure]

DRB1 *0401 algorithm: ARB values. ARB values of peptides bearing the P1-P6 primary anchors as a function of the different residues at nonanchor positions to DRB1 *0401. The panel was composed of 384 peptides based on naturally occurring and non-natural sequences derived from various viral, tumor or bacterial origins. Values ≧4.00 are indicated by bold type. Values ≦0.25 are indicated by italicized type and underlines.

[0388] TABLE 8

[chemical structure]

DRB1 *0101 algorithm: ARB values. ARB values of peptides bearing the P1-P6 primary anchors as a function of the different residues an nonanchor positions to DRB1 *0101. The panel was composed of 384 peptides based on naturally occurring and non-natural sequences derived from various derived from various viral, tumor or bacterial origins. Values ≧4.00 are indicated by bold type. Values ≦0.25 are indicated by italicized type and underlines.

[0389] TABLE 9

[chemical structure]

DRB1 *0701 algorithm: ARB values. ARB values of peptides bearing the P1-P6 primary anchors as a function of the different residues an nonanchor positions to DRB1 *0101. The panel was composed of 384 peptides based on naturally occurring and non-natural sequences derived from various derived from various viral, tumor or bacterial origins. Values ≧4.00 are indicated by bold type. Values ≦0.25 are indicated by italicized type and underlines.

[0390] Two alternative motifs (i.e., submotifs) characterize peptide epitopes that bind to HLA-DR3 molecules (see, e.g., Geluk et al., J. Immunol. 152:5742, 1994). In the first motif (submotif DR3A) a large, hydrophobic residue (L, I, V, M, F, or Y) is present in anchor position 1 of a 9-mer core, and D is present as an anchor at position 4, towards the carboxyl terminus of the epitope. As in other class II motifs, core position 1 may or may not occupy the peptide N-terminal position.

[0391] The alternative DR3 submotif provides for lack of the large, hydrophobic residue at anchor position 1, and/or lack of the negatively charged or amide-like anchor residue at position 4, by the presence of a positive charge at position 6 towards the carboxyl terminus of the epitope. Thus, for the alternative allele-specific DR3 motif (submotif DR3B): L, I, V, M, F, Y, A, or Y is present at anchor position 1; D, N, Q, E, S, or T is present at anchor position 4; and K, R, or H is present at anchor position 6. Peptide binding to HLA-DR3 can be modulated by substitutions at primary and/or secondary anchor positions, preferably choosing respective residues specified for the motif.

[0392] Representative epitopes from the HPV E1 and E2 proteins comprising the DR-1-4-7 supermotif, and representative epitopes from the HPV E1 and E2 proteins comprising the HLA-DR-3a and DR3b motifs, wherein position 1 of the supermotif is at position 1 of the nine-residue core, are set forth in Table 23. Representative epitopes from the HPV E6 and E7 proteins comprising the DR-1-4-7 supermotif, and representative epitopes from the HPV E6 and E7 proteins comprising the HLA-DR-3a and DR3b motifs, wherein position 1 of the supermotif is at position 1 of the nine-residue core, are set forth in Table 24. Exemplary epitopes of 15 amino acids in length that comprises the nine residue core include the three residues on either side that flank the nine residue core. HTL epitopes that comprise the core sequences can also be of lengths other than 15 amino acids, supra. Accordingly, epitopes of the invention include sequences that typically comprise the nine residue core plus 1, 2, 3 (as in the exemplary 15-mer), 4, or 5 flanking residues on either side of the nine residue core.

[0393] Each of the HLA class I or class II epitopes set out in the Tables herein are deemed singly to be an inventive embodiment of this application. Further, it is also an inventive embodiment of this application that each epitope may be used in combination with any other epitope.

Enhancing Population Coverage of the Vaccine

[0394] Vaccines that have broad population coverage are preferred because they are more commercially viable and generally applicable to the most people. Broad population coverage can be obtained using the peptides of the invention (and nucleic acid compositions that encode such peptides) through selecting peptide epitopes that bind to HLA alleles which, when considered in total, are present in most of the population. Table 10 lists the overall frequencies of the HLA class I supertypes in various ethnicities (Section A) and the combined population coverage achieved by the A2-, A3-, and B7-supertypes (Section B). The A2-, A3-, and B7 supertypes are each present on the average of over 40% in each of these five major ethnic groups. Coverage in excess of 80% is achieved with a combination of these supermotifs. These results suggest that effective and non-ethnically biased population coverage is achieved upon use of a limited number of cross-reactive peptides. Although the population coverage reached with these three main peptide specificities is high, coverage can be expanded to reach 95% population coverage and above, and more easily achieve truly multi-specific responses upon use of additional supermotif or allele-specific motif bearing peptides.

[0395] The B44-, A1-, and A24-supertypes are each present, on average, in a range from 25% to 40% in these major ethnic populations (Section A). While less prevalent overall, the B27-, B58-, and B62 supertypes are each present with a frequency >25% in at least one major ethnic group (section A). In Section B, Table 10 summarizes the estimated prevalence of combinations of HLA supertypes that have been identified in five major ethnic groups. The incremental coverage obtained by the inclusion of A1,- A24-, and B44-supertypes to the A2, A3, and B7 coverage and coverage obtained with all of the supertypes described herein, is shown.

[0396] The data presented herein, together with the previous definition of the A2-, A3-, and B7-supertypes, indicates that all antigens, with the possible exception of A29, B8, and B46, can be classified into a total of nine HLA supertypes. By including epitopes from the six most frequent supertypes, an average population coverage of 99% is obtained for five major ethnic groups.

TABLE 10
Population coverage with combined HLA Supertypes

| | PHENOTYPIC FREQUENCY | | | | | |
|---|---|---|---|---|---|---|
| | | North | | | | |
| | | American | | | | |
| HLA-SUPERTYPES | Caucasian | Black | Japanese | Chinese | Hispanic | Average |
| A. Individual | | | | | | |
| Supertypes | | | | | | |
| A2 | 45.8 | 39.0 | 42.4 | 45.9 | 43.0 | 43.2 |
| A3 | 37.5 | 42.1 | 45.8 | 52.7 | 43.1 | 44.2 |
| B7 | 43.2 | 55.1 | 57.1 | 43.0 | 49.3 | 49.5 |
| A1 | 47.1 | 16.1 | 21.8 | 14.7 | 26.3 | 25.2 |
| A24 | 23.9 | 38.9 | 58.6 | 40.1 | 38.3 | 40.0 |
| B44 | 43.0 | 21.2 | 42.9 | 39.1 | 39.0 | 37.0 |
| B27 | 28.4 | 26.1 | 13.3 | 13.9 | 35.3 | 23.4 |
| B62 | 12.6 | 4.8 | 36.5 | 25.4 | 11.1 | 18.1 |
| B58 | 10.0 | 25.1 | 1.6 | 9.0 | 5.9 | 10.3 |
| B. Combined | | | | | | |
| Supertypes | | | | | | |
| A2, A3, B7 | 84.3 | 86.8 | 89.5 | 89.8 | 86.8 | 87.4 |
| A2, A3, B7, | 99.5 | 98.1 | 100.0 | 99.5 | 99.4 | 99.3 |
| A24, B44, A1 | | | | | | |
| A2, A3, B7, | 99.9 | 99.6 | 100.0 | 99.8 | 99.9 | 99.8 |
| A24, B44, A1, | | | | | | |
| B27, B62, B58 | | | | | | |

Immune Response-Stimulating Peptide Analogs

[0397] In general, CTL and HTL responses to whole antigens are not directed against all possible epitopes. Rather, they are restricted to a few “immunodominant” determinants (Zinkernagel, et al., Adv. Immunol. 27:5159, 1979; Bennink, et al., J. Exp. Med. 168:1935-39, 1988; Rawle, et al., J. Immunol. 146:3977-84, 1991). It has been recognized that immunodominance (Benacerraf, et al., Science 175:273-79, 1972) could be explained by either the ability of a given epitope to selectively bind a particular HLA protein (determinant selection theory) (Vitiello, et al., J. Immunol. 131:1635, 1983); Rosenthal, et al., Nature 267:156-158, 1977), or to be selectively recognized by the existing TCR (T cell receptor) specificities (repertoire theory) (Klein, J., IMMUNOLOGY, THE SCIENCE OF SELF-NONSELF DISCRIMINATION, John Wiley & Sons, New York, pp. 270-310, 1982). It has been demonstrated that additional factors, mostly linked to processing events, can also play a key role in dictating, beyond strict immunogenicity, which of the many potential determinants will be presented as immunodominant (Sercarz, et al., Ann. Rev. Immunol. 11:729-766, 1993).

[0398] The concept of dominance and subdominance is relevant to immunotherapy of both infectious diseases and cancer. For example, in the course of chronic viral disease, recruitment of subdominant epitopes can be important for successful clearance of the infection, especially if dominant CTL or HTL specificities have been inactivated by functional tolerance, suppression, mutation of viruses and other mechanisms (Franco, et al., Curr. Opin. Immunol. 7:524-531, 1995). In the case of cancer and tumor antigens, CTLs recognizing at least some of the highest binding affinity peptides might be functionally inactivated. Lower binding affinity peptides are preferentially recognized at these times, and may therefore be preferred in therapeutic or prophylactic anti-cancer vaccines.

[0399] In particular, it has been noted that a significant number of epitopes derived from known non-viral tumor associated antigens (TAA) bind HLA class I with intermediate affinity (IC₅₀ in the 50-500 nM range). For example, it has been found that 8 of 15 known TAA peptides recognized by tumor infiltrating lymphocytes (TIL) or CTL bound in the 50-500 nM range. (These data are in contrast with estimates that 90% of known viral antigens were bound by HLA class I molecules with IC₅₀ of 50 nM or less, while only approximately 10% bound in the 50-500 nM range (Sette, et al., J. Immunol., 153:558-92, 1994). In the cancer setting this phenomenon is probably due to elimination or functional inhibition of the CTL recognizing several of the highest binding peptides, presumably because of T cell tolerization events.

[0400] Without intending to be bound by theory, it is believed that because T cells to dominant epitopes may have been clonally deleted, selecting subdominant epitopes may allow existing T cells to be recruited, which will then lead to a therapeutic or prophylactic response. However, the binding of HLA molecules to subdominant epitopes is often less vigorous than to dominant ones. Accordingly, there is a need to be able to modulate the binding affinity of particular immunogenic epitopes for one or more HLA molecules, and thereby to modulate the immune response elicited by the peptide, for example to prepare analog peptides which elicit a more vigorous response. This ability would greatly enhance the usefulness of peptide epitope-based vaccines and therapeutic agents.

[0401] Although peptides with suitable cross-reactivity among all alleles of a superfamily are identified by the screening procedures described above, cross-reactivity is not always as complete as possible, and in certain cases procedures to increase cross-reactivity of peptides can be useful; moreover, such procedures can also be used to modify other properties of the peptides such as binding affinity or peptide stability. Having established the general rules that govern cross-reactivity of peptides for HLA alleles within a given motif or supermotif, modification (i.e., analoging) of the structure of peptides of particular interest in order to achieve broader (or otherwise modified) HLA binding capacity can be performed. More specifically, peptides which exhibit the broadest cross-reactivity patterns, can be produced in accordance with the teachings herein. The present concepts related to analog generation are set forth in greater detail in co-pending U.S. patent application Ser. No. 09/226,775, filed Jan. 6, 1999, and PCT Application No. PCT/US00/31856, filed Nov. 20, 2000 (published as PCT Publication No. WO01/36452).

[0402] In brief, the strategy employed utilizes the motifs or supermotifs which correlate with binding to certain HLA molecules. The motifs or supermotifs are defined by having primary anchors, and in many cases secondary anchors. Analog peptides can be created by substituting amino acid residues at primary anchor, secondary anchor, or at primary and secondary anchor positions. Generally, analogs are made for peptides that already bear a motif or supermotif. Preferred secondary anchor residues of supermotifs and motifs that have been defined for HLA class I and class II binding peptides are shown in FIGS. 5, 6, 7A, 7B, 8, 9, and 10.

[0403] For a number of the motifs or supermotifs in accordance with the invention, residues are defined which are deleterious to binding to allele-specific HLA molecules or members of HLA supertypes that bind the respective motif or supermotif. Accordingly, removal of such residues that are detrimental to binding can be performed in accordance with the present invention. For example, in the case of the A3 supertype, when all peptides that have such deleterious residues are removed from the population of peptides used in the analysis, the incidence of cross-reactivity increased from 22% to 37% (see, e.g., Sidney, J. et al., Hu. Immunol. 45:79, 1996). Thus, one strategy to improve the cross-reactivity of peptides within a given supermotif is simply to delete one or more of the deleterious residues present within a peptide and substitute a small “neutral” residue such as Ala (that may not influence T cell recognition of the peptide). An enhanced likelihood of cross-reactivity is expected if, together with elimination of detrimental residues within a peptide, “preferred” residues associated with high affinity binding to an allele-specific HLA molecule or to multiple HLA molecules within a superfamily are inserted.

[0404] To ensure that an analog peptide, when used as a vaccine, actually elicits a CTL response to the native epitope in vivo (or, in the case of class II epitopes, elicits helper T cells that cross-react with the wild type peptides), the analog peptide may be used to immunize T cells in vitro from individuals of the appropriate HLA allele. Thereafter, the capacity of the immunized cells to induce lysis of wild type peptide sensitized target cells is evaluated. It will be desirable to use as antigen presenting cells, cells that have been either infected, or transfected with the appropriate genes, or, in the case of class II epitopes only, cells that have been pulsed with whole protein antigens, to establish whether endogenously produced antigen is also recognized by the relevant T cells.

[0405] Another embodiment of the invention is to create analogs of weak binding peptides, to thereby ensure adequate numbers of cross-reactive cellular binders. Class I binding peptides exhibiting binding affinities of 500-5000 nM, and carrying an acceptable, but suboptimal, primary anchor residue at one or both positions can be “fixed” by substituting preferred anchor residues in accordance with the respective supertype. The analog peptides can then be tested for cross-binding activity.

[0406] Another embodiment for generating effective peptide analogs involves the substitution of residues that have an adverse impact on peptide stability or solubility in, e.g., a liquid environment. This substitution may occur at any position of the peptide epitope. For example, a cysteine (C) can be substituted out in favor of α-amino butyric acid. Due to its chemical nature, cysteine has the propensity to form disulfide bridges and sufficiently alter the peptide structurally so as to reduce binding capacity. Substituting α-amino butyric acid for C not only alleviates this problem, but actually improves binding and cross-binding capability in certain instances (see, e.g., the review by Sette et al., In: Persistent Viral Infections, Eds. R. Ahmed and I. Chen, John Wiley & Sons, England, 1999). Substitution of cysteine with α-amino butyric acid may occur at any residue of a peptide epitope, i.e. at either anchor or non-anchor positions.

Computer Screening of Protein Sequences from Disease-Related Antigens for Supermotif- or Motif-Bearing Peptides

[0407] In order to identify supermotif- or motif-bearing epitopes in a target antigen, a native protein sequence, e.g., a tumor-associated antigen, or sequences from an infectious organism, or a donor tissue for transplantation, is screened using a means for computing, such as an intellectual calculation or a computer, to determine the presence of a supermotif or motif within the sequence. The information obtained from the analysis of native peptide can be used directly to evaluate the status of the native peptide or may be utilized subsequently to generate the peptide epitope.

[0408] Computer programs that allow the rapid screening of protein sequences for the occurrence of the subject super-motifs or motifs are encompassed by the present invention; as are programs that permit the generation of analog peptides. These programs are implemented to analyze any identified amino acid sequence or operate on an unknown sequence and simultaneously determine the sequence and identify motif-bearing epitopes thereof; analogs can be simultaneously determined as well. Generally, the identified sequences will be from a pathogenic organism or a tumor-associated peptide. For example, the target molecules considered herein include, without limitation, the E1, E2, E4, E5a, E5b, E6, E7, L1 and L2 proteins of HPV.

[0409] In cases where the sequences of multiple variants of the same target protein are available, potential peptide epitopes can also be selected on the basis of their conservancy. For example, a criterion for conservancy may define that the entire sequence of an HLA class I binding peptide or the entire 9-mer core of a class II binding peptide, be conserved in a designated percentage, of the sequences evaluated for a specific protein antigen.

[0410] To target a broad population that may be infected with a number of different strains, it is preferable to include in vaccine compositions epitopes that are representative of HPV antigen sequences from different HPV strains. As appreciated by those in the art, regions with greater or lesser degrees of conservancy among HPV strains can be employed as appropriate for a given antigenic target. In preferred embodiments of the present invention, one or more of HPV Types 6a, 6b, 11a, 16, 18, 31, 33, 45, 52, 56, and/or 58 are comprised by a given peptide epitope of the present invention.

[0411] It is important that the selection criteria utilized for prediction of peptide binding are as accurate as possible, to correlate most efficiently with actual binding. Prediction of peptides that bind, for example, to HLA-A*0201, on the basis of the presence of the appropriate primary anchors, is positive at about a 30% rate (see, e.g., Ruppert, J. et al. Cell 74:929, 1993). However, by extensively analyzing peptide-HLA binding data disclosed herein, data in related patent applications, and data in the art, the present inventors have developed a number of allele-specific polynomial algorithms that dramatically increase the predictive value over identification on the basis of the presence of primary anchor residues alone. These algorithms take into account not only the presence or absence of primary anchors, but also consider the positive or deleterious presence of secondary anchor residues (to account for the impact of different amino acids at different positions). The algorithms are essentially based on the premise that the overall affinity (or ΔG) of peptide-HLA interactions can be approximated as a linear polynomial function of the type:
ΔG=aₗᵢ×a₂ᵢ×a₃ᵢ . . . ×aₙᵢ

[0412] where aⱼᵢ is a coefficient that represents the effect of the presence of a given amino acid (j) at a given position (i) along the sequence of a peptide of n amino acids. An important assumption of this method is that the effects at each position are essentially independent of each other. This assumption is justified by studies that demonstrated that peptides are bound to HLA molecules and recognized by T cells in essentially an extended conformation. Derivation of specific algorithm coefficients has been described, for example, in Gulukota, K., et al., J. Mol. Biol. 267:1258-67, 1997.

[0413] Additional methods to identify preferred peptide sequences, which also make use of specific motifs, include the use of neural networks and molecular modeling programs (see, e.g., Milik, et al., Nature Biotechnology 16:753, 1998; Altuvia, et al., Hum. Immunol. 58:1, 1997; Altuvia, et al., J. Mol. Biol. 249:244, 1995; Buus, S. Curr. Opin. Immunol. 11:209-213, 1999; Brusic, V., et al., Bioinformatics 14:121-130, 1998; Parker, et al., J. Immunol. 152:163, 1993; Meister, et al., Vaccine 13:581, 1995; Hammer, et al., J. Exp. Med. 180:2353, 1994; Stumiolo, et al., Nature Biotechnol. 17:555 1999).

[0414] For example, it has been shown that in sets of A*0201 motif-bearing peptides containing at least one preferred secondary anchor residue while avoiding the presence of any deleterious secondary anchor residues, 69% of the peptides will bind A*0201 with an IC₅₀ less than 500 nM (Ruppert, J., et al. Cell 74:929, 1993). In certain embodiments, the algorithms of the invention are also flexible in that cut-off scores may be adjusted to select sets of peptides with greater or lower predicted binding properties, as desired.

[0415] In utilizing computer screening to identify peptide epitopes, a protein sequence or translated sequence may be analyzed using software developed to search for motifs, for example the “FINDPATTERNS’ program (Devereux, et al. Nucl. Acids Res. 12:387-395, 1984) or MotifSearch 1.4 software program (D. Brown, San Diego, Calif.) to identify potential peptide sequences containing appropriate HLA binding motifs. The identified peptides can be scored using customized polynomial algorithms to predict their capacity to bind specific HLA class I or class II alleles. As appreciated by one of ordinary skill in the art, a large array of computer programming software and hardware options are available in the relevant art which can be employed to implement the motifs of the invention in order to evaluate (e.g., without limitation, to identify epitopes, identify epitope concentration per peptide length, or to generate analogs) known or unknown peptide sequences.

[0416] In accordance with the procedures described above, HPV peptide epitopes that are able to bind HLA supertype groups or allele-specific HLA molecules have been identified (Tables 13-24).

Preparation of Peptide Epitopes

[0417] Peptides in accordance with the invention can be prepared synthetically, by recombinant DNA technology or chemical synthesis, or from natural sources such as native tumors or pathogenic organisms. Peptide epitopes may be synthesized individually or as polyepitopic peptides. Although the peptide will preferably be substantially free of other naturally occurring host cell proteins and fragments thereof, in some embodiments the peptides may be synthetically conjugated to native fragments or particles.

[0418] The peptides in accordance with the invention can be a variety of lengths, and either in their neutral (uncharged) forms or in forms which are salts. The peptides in accordance with the invention are either free of modifications such as glycosylation, side chain oxidation, or phosphorylation; or they contain these modifications, subject to the condition that modifications do not destroy the biological activity of the peptides as described herein.

[0419] When possible, it may be desirable to optimize HLA class I binding epitopes of the invention, such as can be used in a polyepitopic construct, to a length of about 8 to about 13 amino acid residues, often 8 to 11 amino acid residues, and, preferably, 9 to 10 amino acids. HLA class II binding peptide epitopes of the invention may be optimized to a length of about 6 to about 30 amino acid residues in length, preferably to between about 13 and about 20 amino acid residues. Preferably, the peptide epitopes are commensurate in size with endogenously processed pathogen-derived peptides or tumor cell peptides that are bound to the relevant HLA molecules, however, the identification and preparation of peptides that comprise epitopes of the invention can also be carried out using the techniques described herein.

[0420] In alternative embodiments, epitopes of the invention can be linked as a polyepitopic peptide, or as a minigene that encodes a polyepitopic peptide.

[0421] In another embodiment, it is preferred to identify native peptide regions that contain a high concentration of class I and/or class II epitopes. Such a sequence is generally selected on the basis that it contains the greatest number of epitopes per amino acid length. It is to be appreciated that epitopes can be present in a nested or overlapping manner, e.g. a 10 amino acid long peptide could contain two 9 amino acid long epitopes and one 10 amino acid long epitope; upon intracellular processing, each epitope can be exposed and bound by an HLA molecule upon administration of such a peptide. This larger, preferably multi-epitopic, peptide can be generated synthetically, recombinantly, or via cleavage from the native source.

[0422] The peptides of the invention can be prepared in a wide variety of ways. For the preferred relatively short size, the peptides can be synthesized in solution or on a solid support in accordance with conventional techniques. Various automatic synthesizers are commercially available and can be used in accordance with known protocols. (See, for example, Stewart & Young, SOLID PHASE PEPTIDE SYNTHESIS, 2D. ED., Pierce Chemical Co., 1984). Further, individual peptide epitopes can be joined using chemical ligation to produce larger peptides that are still within the bounds of the invention.

[0423] Alternatively, recombinant DNA technology can be employed wherein a nucleotide sequence which encodes an immunogenic peptide of interest is inserted into an expression vector, transformed or transfected into an appropriate host cell and cultivated under conditions suitable for expression. These procedures are generally known in the art, as described generally in Sambrook, et al., MOLECULAR CLONING, A LABORATORY MANUAL, Cold Spring Harbor Press, Cold Spring Harbor, N.Y. (1989). Thus, recombinant polypeptides which comprise one or more peptide sequences of the invention can be used to present the appropriate T cell epitope.

[0424] The nucleotide coding sequence for peptide epitopes of the preferred lengths contemplated herein can be synthesized by chemical techniques, for example, the phosphotriester method of Matteucci, et al., J. Am. Chem. Soc. 103:3185 (1981). Peptide analogs can be made simply by substituting the appropriate and desired nucleic acid base(s) for those that encode the native peptide sequence; exemplary nucleic acid substitutions are those that encode an amino acid defined by the motifs/supermotifs herein. The coding sequence can then be provided with appropriate linkers and ligated into expression vectors commonly available in the art, and the vectors used to transform suitable hosts to produce the desired fusion protein. A number of such vectors and suitable host systems are now available. For expression of the fusion proteins, the coding sequence will be provided with operably linked start and stop codons, promoter and terminator regions and usually a replication system to provide an expression vector for expression in the desired cellular host. For example, promoter sequences compatible with bacterial hosts are provided in plasmids containing convenient restriction sites for insertion of the desired coding sequence. The resulting expression vectors are transformed into suitable bacterial hosts. Of course, yeast, insect or mammalian cell hosts may also be used, employing suitable vectors and control sequences.

Assays to Detect T-Cell Responses

[0425] Once HLA binding peptides are identified, they can be tested for the ability to elicit a T-cell response. The preparation and evaluation of motif-bearing peptides are described in PCT publications WO 94/20127 and WO 94/03205. Briefly, peptides comprising epitopes from a particular antigen are synthesized and tested for their ability to bind to the appropriate HLA proteins. These assays may involve evaluating the binding of a peptide of the invention to purified HLA class I molecules in relation to the binding of a radioiodinated reference peptide. Alternatively, cells expressing empty class I molecules (i.e. lacking peptide therein) may be evaluated for peptide binding by immunofluorescent staining and flow microfluorimetry. Other assays that may be used to evaluate peptide binding include peptide-dependent class I assembly assays and/or the inhibition of CTL recognition by peptide competition. Those peptides that bind to the class I molecule, typically with an affinity of 500 nM or less, are further evaluated for their ability to serve as targets for CTLs derived from infected or immunized individuals, as well as for their capacity to induce primary in vitro or in vivo CTL responses that can give rise to CTL populations capable of reacting with selected target cells associated with a disease.

[0426] Analogous assays are used for evaluation of HLA class II binding peptides. HLA class II motif-bearing peptides that are shown to bind, typically at an affinity of 1000 nM or less, are further evaluated for the ability to stimulate HTL responses.

[0427] Conventional assays utilized to detect T cell responses include proliferation assays, lymphokine secretion assays, direct cytotoxicity assays, and limiting dilution assays. For example, antigen-presenting cells that have been incubated with a peptide can be assayed for the ability to induce CTL responses in responder cell populations. Antigen-presenting cells can be normal cells such as peripheral blood mononuclear cells or dendritic cells. Alternatively, mutant non-human mammalian cell lines that are deficient in their ability to load class I molecules with internally processed peptides and that have been transfected with the appropriate human class I gene, may be used to test for the capacity of the peptide to induce in vitro primary CTL responses.

[0428] Peripheral blood mononuclear cells (PBMCs) may be used as the responder cell source of CTL precursors. The appropriate antigen-presenting cells are incubated with peptide, after which the peptide-loaded antigen-presenting cells are then incubated with the responder cell population under optimized culture conditions. Positive CTL activation can be determined by assaying the culture for the presence of CTLs that kill radio-labeled target cells, both specific peptide-pulsed targets as well as target cells expressing endogenously processed forms of the antigen from which the peptide sequence was derived.

[0429] Additionally, a method has been devised which allows direct quantification of antigen-specific T cells by staining with Fluorescein-labeled HLA tetrameric complexes (Altman, J. D., et al., Proc. Natl. Acad. Sci. USA 90:10330, 1993; Altman, J. D. et al., Science 274:94, 1996). Other relatively recent technical developments include staining for intracellular lymphokines, and interferon release assays or ELISPOT assays. Tetramer staining, intracellular lymphokine staining and ELISPOT assays all appear to be at least 10-fold more sensitive than more conventional assays (Lalvani, A., et al., J. Exp. Med. 186:859, 1997; Dunbar, P. R., et al., Curr. Biol. 8:413, 1998; Murali-Krishna, K., et al., Immunity 8:177, 1998).

[0430] HTL activation may also be assessed using such techniques known to those in the art such as T cell proliferation and secretion of lymphokines, e.g. IL-2 (see, e.g. Alexander, et al., Immunity 1:751-61, 1994).

[0431] Alternatively, immunization of HLA transgenic mice can be used to determine immunogenicity of peptide epitopes. Several transgenic mouse models including mice with human A2.1, A11 (which can additionally be used to analyze HLA-A3 epitopes), and B7 alleles have been characterized and others (e.g., transgenic mice for HLA-A1 and A24) are being developed. HLA-DR1 and HLA-DR3 mouse models have also been developed. Additional transgenic mouse models with other HLA alleles may be generated as necessary. Mice may be immunized with peptides emulsified in Incomplete Freund's Adjuvant and the resulting T cells tested for their capacity to recognize peptide-pulsed target cells and target cells transfected with appropriate genes. CTL responses may be analyzed using cytotoxicity assays described above. Similarly, HTL responses may be analyzed using such assays as T cell proliferation or secretion of lymphokines.

Use of Peptide Epitopes as Diagnostic Agents and for Evaluating Immune Responses

[0432] In certain embodiments of the invention, HLA class I and class II binding peptides as described herein can be used as reagents to evaluate an immune response. The immune response to be evaluated is induced by using as an immunogen any agent that may result in the production of antigen-specific CTLs or HTLs that recognize and bind to the peptide epitope(s) to be employed as the reagent. The peptide reagent need not be used as the immunogen. Assay systems that are used for such an analysis include relatively recent technical developments such as tetramers, staining for intracellular lymphokines and interferon release assays, or ELISPOT assays.

[0433] For example, a peptide of the invention is used in a tetramer staining assay to assess peripheral blood mononuclear cells for the presence of antigen-specific CTLs following exposure to a pathogen or immunogen. The HLA-tetrameric complex is used to directly visualize antigen-specific CTLs (see, e.g., Ogg, et al., Science 279:2103-06, 1998; and Altman, et al., Science 174:94-96, 1996) and determine the frequency of the antigen-specific CTL population in a sample of peripheral blood mononuclear cells.

[0434] A tetramer reagent using a peptide of the invention is generated as follows: A peptide that binds to an HLA molecule is refolded in the presence of the corresponding HLA heavy chain and β₂-Microglobulin to generate a trimolecular complex. The complex is biotinylated at the carboxyl terminal end of the heavy chain at a site that was previously engineered into the protein. Tetramer formation is then induced by the addition of streptavidin. By means of fluorescently labeled streptavidin, the tetramer can be used to stain antigen-specific cells. The cells can then be readily identified, for example, by flow cytometry. Such procedures are used for diagnostic or prognostic purposes. Cells identified by the procedure can also be used for therapeutic purposes.

[0435] Peptides of the invention are also used as reagents to evaluate immune recall responses. (see, e.g., Bertoni, et al., J. Clin. Invest. 100:503-13, 1997 and Penna, et al., J. Exp. Med. 174:1565-70, 1991.) For example, patient PBMC samples from individuals infected with HPV are analyzed for the presence of antigen-specific CTLs or HTLs using specific peptides. A blood sample containing mononuclear cells may be evaluated by cultivating the PBMCs and stimulating the cells with a peptide of the invention. After an appropriate cultivation period, the expanded cell population may be analyzed, for example, for CTL or for HTL activity.

[0436] The peptides are also used as reagents to evaluate the efficacy of a vaccine. PBMCs obtained from a patient vaccinated with an immunogen are analyzed using, for example, either of the methods described above. The patient is HLA typed, and peptide epitope reagents that recognize the allele-specific molecules present in that patient are selected for the analysis. The immunogenicity of the vaccine is indicated by the presence of HPV epitope-specific CTLs and/or HTLs in the PBMC sample.

[0437] The peptides of the invention are also used to make antibodies, using techniques well known in the art (see, e.g. CURRENT PROTOCOLS IN IMMUNOLOGY, Wiley/Greene, NY; and Antibodies A Laboratory Manual Harlow, Harlow and Lane, Cold Spring Harbor Laboratory Press, 1989), which may be useful as reagents to diagnose HPV infection. Such antibodies include those that recognize a peptide in the context of an HLA molecule, i.e., antibodies that bind to a peptide-MHC complex.

Selection of Peptide Epitopes from Multiple HPV Types Using Optimal Variant Technology

[0438] The present invention is directed to methods for selecting a variant of a peptide epitope which induces a CTL response against another variant(s) of the peptide epitope, by determining whether the variant comprises only conserved residues, as defined herein, at non-anchor positions in comparison to the other variant(s).

[0439] In some embodiments, antigen sequences from a population of HPV, said antigens comprising variants of a peptide epitope, are optimally aligned (manually or by computer) along their length, preferably their full length. Variant(s) of a peptide epitope (preferably naturally occurring variants), each 8-11 amino acids in length and comprising the same MHC class I supermotif or motif, are identified manually or with the aid of a computer. In some embodiments, a variant is optimally chosen which comprises preferred anchor residues of said motif and/or which occurs with high frequency within the population of variants. In other embodiments, a variant is randomly chosen. The randomly or otherwise chosen variant is compared to from one to all the remaining variant(s) to determine whether it comprises only conserved residues in the non-anchor positions relative to from one to all the remaining variant(s).

[0440] The present invention is also directed to variants identified by the methods above; peptides comprising such variants; nucleic acids encoding such variants and peptides; cells comprising such variants, and/or peptides, and/or nucleic acids; compositions comprising such variants, and/or peptides, and/or nucleic acids, and/or cells; as well as therapeutic and diagnostic methods for using such variants, peptides, nucleic acids, cells, and compositions.

[0441] In some embodiments, the invention is directed to a method for identifying a candidate peptide epitope which induces a HLA class I CTL response against variants of said peptide epitope, comprising:
[0442] (a) identifying, from a particular antigen of HPV, variants of a peptide epitope 8-11 amino acids in length, each variant comprising primary anchor residues of the same HLA class I binding motif; and
[0443] (b) determining whether one of said variants comprises only conserved non-anchor residues in comparison to at least one remaining variant, thereby identifying a candidate peptide epitope.
[0444] In some embodiments, (b) comprises identifying a variant which comprises only conserved non-anchor residues in comparison to at least 25%, at least 50%, at least 75%, at least 80%, at least 85%, at least 90%, at least 95%, at least 97%, or at least 99% of the remaining variants.

[0445] In some embodiments, the invention is directed to a method for identifying a candidate peptide epitope which induces a HLA class I CTL response against variants of said peptide epitope, comprising:
[0446] (a) identifying, from a particular antigen of HPV, variants of a peptide epitope 8-11 amino acids in length, each variant comprising primary anchor residues of the same HLA class I binding motif;
[0447] (b) determining whether each of said variants comprises conserved, semi-conserved or non-conserved non-anchor residues in comparison to each of the remaining variants; and
[0448] (c) identifying a variant which comprises only conserved non-anchor residues in comparison to at least one remaining variant.

[0449] In some embodiments, (c) comprises identifying a variant which comprises only conservative non-anchor residues in comparison to at least 25%, at least 50%, at least 75%, at least 80%, at least 85%, at least 90%, at least 95%, at least 97%, or at least 99% of the remaining variants.

[0450] In some embodiments, the invention is directed to a method for identifying a candidate peptide epitope which induces a HLA class I CTL response against variants of said peptide epitope, comprising:
[0451] (a) identifying, from a particular antigen of HPV, a population of variants of a peptide epitope 8-11 amino acids in length, each peptide epitope comprising primary anchor residues of the same HLA class I binding motif;
[0452] (b) choosing a variant selected from the group consisting of:
[0453] a variant which comprises preferred primary anchor residues of said motif;

[0454] (c) a variant which occurs with high frequency within the population of variants; and
[0455] (d) determining whether the variant of (b) comprises only conserved non-anchor residues in comparison to at least one remaining variant, thereby identifying a candidate peptide epitope.

[0456] In some embodiments, (c) comprises identifying a variant which comprises only conservative non-anchor residues in comparison to at least 25%, at least 50%, at least 75%, at least 80%, at least 85%, at least 90%, at least 95%, at least 97%, or at least 99% of the remaining variants.

[0457] In some embodiments, the invention is directed to method for identifying a candidate peptide epitope which induces a HLA class I CTL response against variants of said peptide epitope, comprising:
[0458] (a) identifying, from a particular antigen of HPV, a population of variants of a peptide epitope 8-11 amino acids in length, each peptide epitope comprising primary anchor residues of the same HLA class I binding motif;

[0459] (b) choosing a variant selected from the group consisting of:
[0460] (c) a variant which comprises preferred primary anchor residues of said motif;
[0461] (d) a variant which occurs with high frequency within the population of variants;
[0462] (e) determining whether the variant of (b) comprises conserved, semi-conserved or non-conserved non-anchor residues in comparison to each of the remaining variants; and
[0463] (f) identifying a variant which comprises only conserved non-anchor residues in comparison to at least one remaining variant.

[0464] In some embodiments, (d) comprises identifying a variant which comprises only conservative non-anchor residues in comparison to at least 25%, at least 50%, at least 75%, at least 80%, at least 85%, at least 90%, at least 95%, at least 97%, or at least 99% of the remaining variants.

[0465] In some embodiments, (a) comprises aligning the sequences of said antigens. In a preferred embodiment, (a) comprises aligning the sequences of HPV E1 proteins obtained from HPV Types 16, 18, 31, 33, 45, 52, 56, and 58 (see e.g., Table 25). In a further preferred embodiment, (a) comprises aligning the sequences of HPV E2 proteins obtained from HPV Types 16, 18, 31, 33, 45, 52, 56, and 58 (see e.g., Table 26). In a preferred embodiment, (a) comprises aligning the sequences of HPV E6 proteins obtained from HPV Types 16, 18, 31, 33, 45, 52, 56, and 58 (see e.g., Table 27). In a preferred embodiment, (a) comprises aligning the sequences of HPV E7 proteins obtained from HPV Types 16, 18, 31, 33, 45, 52, 56, and 58 (see e.g., Table 28).

[0466] In some embodiments, (b) comprises choosing a variant which comprises preferred primary anchor residues of said motif.

[0467] In some embodiments, (b) comprises choosing a variant which occurs with high frequency within said population.

[0468] In some embodiments, (b) comprises ranking said variants by frequency of occurrence within said population.

[0469] In some embodiments, (b) comprises choosing a variant which comprises preferred primary anchor residues of said motif and which occurs with high frequency within said population.

[0470] In some embodiments, (b) comprises ranking said variants by frequency of occurrence within said population.

[0471] In some embodiments, the identified variant comprises the fewest conserved anchor residues in comparison to each of the remaining variants.

[0472] In some embodiments, the remaining variants comprise 1, 2, 3, 4, 5, 6, 7, 8, 9, 10, 11, 12, 13, 14, 15, 16, 17, 18, 19, 20, 21, 22, 23, 24, 25, 26, 27, 27, 28, 30, 35, 40, 45, 50, 55, 60, 65, 70, 75, 80, 85, 90, 95, 100, 110, 120, 130, 140, 150, 160, 170, 180, 190, 200, 220, 240, 260, 280, or 300 variants.

[0473] In some embodiments, the HPV antigen is selected from the group consisting of: E1, E2, E3, E4, E5, E6, E7, L1, and L2.

[0474] In some embodiments, the selected variant and the at least one remaining variant comprise different primary anchor residues of the same motif or supermotif.

[0475] In some embodiments, the motif or supermotif is selected from the group consisting of those in Table 4.

[0476] In some embodiments, the conserved non-anchor residues are at any of positions 3-7 of said variant.

[0477] In some embodiments, the variant comprises only 1-3 conserved non-anchor residues compared to at least one remaining variant.

[0478] In some embodiments, the variant comprises only 1-2 conserved non-anchor residues compared to at least one remaining variant.

[0479] In some embodiments, the variant comprises only 1 conserved non-anchor residue compared to at least one remaining variant.

[0480] In some embodiments, the HPV infectious agent is selected from the group consisting of HPV strains 6a, 6b, 11a, 16, 18, 31, 33, 45, 52, 56, and 58.

[0481] In some embodiments, the variants are a population of naturally occurring variants.

[0482] Optionally, antigen sequences, either full-length or partial, may be aligned manually or by computer (“optimal alignment”). Convenient computer programs for aligning multiple sequences include Omiga, Oxford software, version 1.1.3, using ClustalW alignment, using an open gap penalty of 10.0, extend gap penalty of 0.05, and delay divergent sequences of 40.0 (see, e.g., Tables 19, 20, 21, and 22, herein); and BLASTP 2.2.5 (Nov. 16, 2002) (Altschul, S. F., et al., Nucl. Acid Res. 25:3389-3402 (1997)) using a cutoff=3e-88 (to select human sequences). Alternatively, alignments may be obtained through publicly available sources such as published journal articles and published patent documents.

Vaccine Compositions

[0483] Vaccines and methods of preparing vaccines that contain an immunogenically effective amount of one or more peptides as described herein are further embodiments of the invention. Once appropriately immunogenic epitopes have been defined, they can be sorted and delivered by various means, herein referred to as “vaccine” compositions. Such vaccine compositions can include, for example, lipopeptides (e.g., Vitiello, A. et al., J. Clin. Invest. 95:341, 1995), peptide compositions encapsulated in poly(DL-lactide-co-glycolide) (“PLG”) microspheres (see, e.g., Eldridge, et al., Molec. Immunol. 28:287-94, 1991: Alonso, et al., Vaccine 12:299-306, 1994; Jones, et al., Vaccine 13:675-681, 1995), peptide compositions contained in immune stimulating complexes (ISCOMS) (see, e.g., Takahashi, et al., Nature 344:873-75, 1990; Hu, et al., Clin Exp Immunol. 113:235-43, 1998), multiple antigen peptide systems (MAPs) (see e.g., Tam, J. P., Proc. Natl. Acad. Sci. U.S.A. 85:5409-13, 1988; Tam, J. P., J. Immunol. Methods 196:17-32, 1996), peptides formulated as multivalent peptides; peptides for use in ballistic delivery systems, typically crystallized peptides, viral delivery vectors (Perkus, M. E., et al., In: Concepts in vaccine development, Kaufmann, S. H. E., Ed., p. 379, 1996; Chakrabarti, S. et al., Nature 320:535, 1986; Hu, S. L., et al., Nature 320:537, 1986; Kieny, M.-P., et al., AIDS Bio/Technology 4:790, 1986; Top, F. H., et al., J. Infect. Dis. 124:148, 1971; Chanda, P. K., et al., Virology 175:535, 1990), particles of viral or synthetic origin (e.g., Kofler, N., et al., J. Immunol. Methods. 192:25, 1996; Eldridge, J. H., et al., Sem. Hematol. 30:16, 1993; Falo, L. D., Jr., et al., Nature Med. 7:649, 1995), adjuvants (Warren, H. S., Vogel, F. R., and Chedid, L., A. Annu. Rev. Immunol. 4:369, 1986; Gupta, R. K. et al., Vaccine 11:293, 1993), liposomes (Reddy, R., et al., J. Immunol. 148:1585, 1992; Rock, K. L., Immunol. Today 17:131, 1996), or, naked or particle absorbed cDNA (Ulmer, J. B. et al., Science 259:1745, 1993; Robinson, H. L., Hunt, L. A., and Webster, R. G., Vaccine 11:957, 1993; Shiver, J. W., et al., In: Concepts in vaccine development, Kaufmann, S. H. E., Ed., p. 423, 1996; Cease, K. B., and Berzofsky, J. A., Ann. Rev. Immunol. 12:923, 1994 and Eldridge, J. H., et al., Sem. Hematol. 30:16, 1993). Toxin-targeted delivery technologies, also known as receptor mediated targeting, such as those of Avant Immunotherapeutics, Inc. (Needham, Mass.) may also be used.

[0484] Vaccine compositions of the invention include nucleic acid-mediated modalities. DNA or RNA encoding one or more of the peptides of the invention can also be administered to a patient. This approach is described, for instance, in Wolff, et. al., Science 247:1465 (1990) as well as U.S. Pat. Nos. 5,580,859; 5,589,466; 5,804,566; 5,739,118; 5,736,524; and 5,679,647; and PCT Publication No. WO 98/04720 (each of which is hereby incorporated by reference in its entirety); and in more detail below. Examples of DNA-based delivery technologies include “naked DNA”, facilitated (e.g., compositions comprising DNA and polyvinylpyrolidone (“PVP) or bupivicaine polymers or peptide-mediated) delivery, cationic lipid complexes, and particle-mediated (“gene gun”) or pressure-mediated delivery (see, e.g., U.S. Pat. No. 5,922,687).

[0485] For therapeutic or prophylactic immunization purposes, the peptides of the invention can be expressed by viral or bacterial vectors. Examples of expression vectors include attenuated viral hosts, such as vaccinia or fowlpox. This approach involves the use of vaccinia virus, for example, as a vector to express nucleotide sequences that encode the peptides of the invention (e.g., modified vaccinia Ankara (Bavarian-Nordic)). Upon introduction into an acutely or chronically infected host or into a non-infected host, the recombinant vaccinia virus expresses the immunogenic peptide, and thereby elicits a host CTL and/or HTL response. Vaccinia vectors and methods useful in immunization protocols are described in, e.g., U.S. Pat. No. 4,722,848. Another vector is BCG (Bacille Calmette Guerin). BCG vectors are described in Stover, et al., Nature 351:456-460 (1991). A wide variety of other vectors useful for therapeutic administration or immunization of the peptides of the invention, e.g. adeno and adeno-associated virus vectors, retroviral vectors, Salmonella typhi vectors, detoxified anthrax toxin vectors, and the like, will be apparent to those skilled in the art from the description herein.

[0486] Furthermore, vaccines in accordance with the invention encompass compositions of one or more of the claimed peptides. A peptide can be present in a vaccine individually. Alternatively, the peptide can exist as a homopolymer comprising multiple copies of the same peptide, or as a heteropolymer of various peptides. Polymers have the advantage of increased immunological reaction and, where different peptide epitopes are used to make up the polymer, the additional ability to induce antibodies and/or CTLs that react with different antigenic determinants of the pathogenic organism or tumor-related peptide targeted for an immune response. The composition can be a naturally occurring region of an antigen or can be prepared, e.g., recombinantly or by chemical synthesis.

[0487] Carriers that can be used with vaccines of the invention are well known in the art, and include, e.g., thyroglobulin, albumins such as human serum albumin, tetanus toxoid, polyamino acids such as poly L-lysine, poly L-glutamic acid, influenza, hepatitis B virus core protein, and the like. The vaccines can contain a physiologically tolerable (i.e., acceptable) diluent such as water, or saline, preferably phosphate buffered saline. The vaccines also typically include an adjuvant. Adjuvants such as incomplete Freund's adjuvant, aluminum phosphate, aluminum hydroxide, alum, or Lipid A, MPL and analogues thereof, are examples of materials well known in the art. Additionally, as disclosed herein, CTL responses can be primed by conjugating peptides of the invention to lipids, such as tripalmitoyl-S-glycerylcysteinlyseryl-serine (P₃CSS).

[0488] Upon immunization with a peptide composition in accordance with the invention, via injection, aerosol, oral, transdermal, transmucosal, intrapleural, intrathecal, or other suitable routes, the immune system of the host responds to the vaccine by producing large amounts of CTLs and/or HTLs specific for the desired antigen. Consequently, the host becomes at least partially immune to later infection, or at least partially resistant to developing an ongoing chronic infection, or derives at least some therapeutic benefit when the antigen was tumor-associated.

[0489] In some embodiments, it may be desirable to combine the class I peptide components with components that induce or facilitate neutralizing antibody and or helper T cell responses to the target antigen of interest. A preferred embodiment of such a composition comprises class I and class II epitopes in accordance with the invention. An alternative embodiment of such a composition comprises a class I and/or class II epitope in accordance with the invention, along with a cross reactive HTL epitope such as PADRE® universal helper T cell epitope (Epimmune, San Diego, Calif.) molecule (described e.g., in U.S. Pat. Nos. 5,679,640, 5,736,142, and 6,413,935).

[0490] A vaccine of the invention can also include antigen-presenting cells (APC), such as dendritic cells (DC), as a vehicle to present peptides of the invention. Vaccine compositions can be created in vitro, following dendritic cell mobilization and harvesting, whereby loading of dendritic cells occurs in vitro. For example, dendritic cells are transfected, e.g., with a minigene in accordance with the invention, or are pulsed with peptides. The dendritic cell can then be administered to a patient to elicit immune responses in vivo.

[0491] Vaccine compositions, either DNA- or peptide-based, can also be administered in vivo in combination with dendritic cell mobilization whereby loading of dendritic cells occurs in vivo.

[0492] Antigenic peptides are used to elicit a CTL and/or HTL response ex vivo, as well. The resulting CTL or HTL cells, can be used to treat chronic infections, or tumors in patients that do not respond to other conventional forms of therapy, or will not respond to a therapeutic vaccine peptide or nucleic acid in accordance with the invention. Ex vivo CTL or HTL responses to a particular antigen (infectious or tumor-associated antigen) are induced by incubating in tissue culture the patient's, or genetically compatible, CTL or HTL precursor cells together with a source of antigen-presenting cells (APC), such as dendritic cells, and the appropriate immunogenic peptide. After an appropriate incubation time (typically about 7-28 days), in which the precursor cells are activated and expanded into effector cells, the cells are infused back into the patient, where they will destroy (CTL) or facilitate destruction (HTL) of their specific target cell (an infected cell or a tumor cell). Transfected dendritic cells may also be used as antigen presenting cells.

[0493] The vaccine compositions of the invention may also be used in combination with other procedures to remove warts or treat HPV infections. Such procedures include cryosurgery, application of caustic agents, electrodessication, surgical excision and laser ablation (Fauci, et al. HARRISON'S PRINCIPLES OF INTERNAL MEDICINE, 14th Ed., McGraw-Hill Co., Inc, 1998), as well as treatment with antiviral drugs such as interferon-α (see, e.g., Stellato, G., et al., Clin. Diagn. Virol. 7(3):167-72 (1997)) or interferon-inducing drugs such as imiquimod. Topical antimetabolites such a 5-fluorouracil may also be applied.

[0494] In patients with HPV-associated cancer, the vaccine compositions of the invention can also be used in conjunction with other treatments used for cancer, e.g., surgery, chemotherapy, drug therapies, radiation therapies, etc. including use in combination with immune adjuvants such as IL-2, IL-12, GM-CSF, and the like.

[0495] Preferably, the following principles are utilized when selecting an array of epitopes for inclusion in a polyepitopic composition for use in a vaccine, or for selecting discrete epitopes to be included in a vaccine and/or to be encoded by nucleic acids such as a minigene. It is preferred that the following principles are balanced in order to make the selection. The multiple epitopes to be incorporated in a given vaccine composition may be, but need not be, contiguous in sequence in the native antigen from which the epitopes are derived.
[0496] (a) Epitopes are selected which, upon administration, mimic immune responses that have been observed to be correlated with clearance of HPV infection or tumor clearance. For HLA Class I this includes 1-4 epitopes that come from at least one antigen. For HLA Class II a similar rationale is employed; again 1-4 epitopes are selected from at least one antigen (see, e.g., Rosenberg, et al., Science 278:1447-50). In preferred embodiments, 2-4 CTL and/or 2-4 HTL epitopes are selected from at least one antigen. In more highly preferred embodiments, 3-4 CTL and/or 3-4 HTL epitopes are selected from at least one antigen. Epitopes from one antigen may be used in combination with epitopes from one or more additional antigens to produce a vaccine that targets HPV-infected cells and/or associated tumors with varying expression patterns of frequently-expressed antigens as described, e.g., in Example 15.
[0497] (b) Epitopes are selected that have the requisite binding affinity established to be correlated with immunogenicity: for HLA Class I an IC₅₀ of 500 nM or less, often 200 nM or less; and for Class II an IC₅₀ of 1000 nM or less.
[0498] (c) Sufficient supermotif bearing-peptides, or a sufficient array of allele-specific motif-bearing peptides, are selected to give broad population coverage. For example, it is preferable to have at least 80% population coverage. A Monte Carlo analysis, a statistical evaluation known in the art, can be employed to assess the breadth, or redundancy of, population coverage.
[0499] (d) When selecting epitopes from cancer-related antigens it is often useful to select analogs because the patient may have developed tolerance to the native epitope. When selecting epitopes for infectious disease-related antigens it is preferable to select either native or analoged epitopes or a combination of both native an analoged epitopes.
[0500] (e) Of particular relevance are epitopes referred to as “nested epitopes.” Nested epitopes occur where at least two epitopes overlap in a given peptide sequence. A nested peptide sequence can comprise both HLA class I and HLA class II epitopes. When providing nested epitopes, a general objective is to provide the greatest number of epitopes per sequence. Thus, an aspect is to avoid providing a peptide that is any longer than the amino terminus of the amino terminal epitope and the carboxyl terminus of the carboxyl terminal epitope in the peptide. When providing a multi-epitopic sequence, such as a sequence comprising nested epitopes, it is generally important to screen the sequence in order to insure that it does not have pathological or other deleterious biological properties.
[0501] (f) If a polyepitopic protein is created, or when creating a minigene, an objective is to generate the smallest peptide that encompasses the epitopes of interest. This principle is similar, if not the same as that employed when selecting a peptide comprising nested epitopes. However, with an artificial polyepitopic peptide, the size minimization objective is balanced against the need to integrate any spacer sequences between epitopes in the polyepitopic protein. Spacer amino acid residues can, for example, be introduced to avoid junctional epitopes (an epitope recognized by the immune system, not present in the target antigen, and only created by the man-made juxtaposition of epitopes), or to facilitate cleavage between epitopes and thereby enhance epitope presentation. Junctional epitopes are generally to be avoided because the recipient may generate an immune response to that non-native epitope. Of particular concern is a junctional epitope that is a “dominant epitope.” A dominant epitope may lead to such a zealous response that immune responses to other epitopes are diminished or suppressed.
[0502] (g) In cases where the sequences of multiple variants of the same target protein are available, potential peptide epitopes can also be selected on the basis of their conservancy. For example, a criterion for conservancy may define that the entire sequence of an HLA class I binding peptide or the entire 9-mer core of a class II binding peptide be conserved in a designated percentage of the sequences evaluated for a specific protein antigen.
[0503] (h) When selecting an array of epitopes of an infectious agent, it is preferred that at least some of the epitopes are derived from early and late proteins. The early proteins of HPV are expressed when the virus is replicating, either following acute or dormant infection. Therefore, it is particularly preferred to use at least some epitopes from early stage proteins to alleviate disease manifestations at the earliest stage possible.
   Minigene Vaccines

[0504] A number of different approaches are available which allow simultaneous delivery of multiple epitopes. Nucleic acids encoding the peptides of the invention are a particularly useful embodiment of the invention. Epitopes for inclusion in a minigene are preferably selected according to the guidelines set forth in the previous section. A preferred means of administering nucleic acids encoding the peptides of the invention uses minigene constructs encoding a peptide comprising one or multiple epitopes of the invention.

[0505] The use of multi-epitope minigenes is described below and in, e.g., U.S. Pat. No. 6,534,482; Ishioka, et al., J. Immunol. 162:3915-25, 1999; An, L. and Whitton, J. L., J. Virol. 71:2292, 1997; Thomson, S. A., et al., J. Immunol. 157:822, 1996; Whitton, J. L., et al., J. Virol. 67:348, 1993; Hanke, R., et al., Vaccine 16:426, 1998. For example, a multi-epitope DNA plasmid encoding supermotif- and/or motif-bearing epitopes derived from multiple regions of one or more HPV antigens, a PADRE® universal helper T cell epitope (or multiple HTL epitopes from HPV antigens), and an endoplasmic reticulum-translocating signal sequence can be engineered. A vaccine may also comprise epitopes that are derived from other antigens.

[0506] The immunogenicity of a multi-epitopic minigene can be tested in transgenic mice to evaluate the magnitude of CTL induction responses against the epitopes tested. Further, the immunogenicity of DNA-encoded epitopes in vivo can be correlated with the in vitro responses of specific CTL lines against target cells transfected with the DNA plasmid. Thus, these experiments can show that the minigene serves to both: (a) generate a CTL response and (b) that the induced CTLs recognize cells expressing the encoded epitopes.

[0507] For example, to create a DNA sequence encoding the selected epitopes (minigene) for expression in human cells, the amino acid sequences of the epitopes may be reverse translated. A human codon usage table can be used to guide the codon choice for each amino acid. These epitope-encoding DNA sequences may be directly adjoined, so that when translated, a continuous polypeptide sequence is created. To optimize expression and/or immunogenicity, additional elements can be incorporated into the minigene design. Examples of amino acid sequences that can be reverse translated and included in the minigene sequence include: HLA class I epitopes, HLA class II epitopes, a ubiquitination signal sequence, and/or an endoplasmic reticulum targeting signal. In addition, HLA presentation of CTL and HTL epitopes may be improved by including synthetic (e.g. poly-alanine) or naturally-occurring flanking sequences adjacent to the CTL or HTL epitopes; these larger peptides comprising the epitope(s) are within the scope of the invention.

[0508] In preferred embodiments, spacer sequences are incorporated between one or more of the epitopes in the minigene vaccine. In more preferred embodiments, the epitopes are ordered and/or spacer sequences are incorporated between one or more epitopes so as to minimize the occurrence of junctional epitopes and to promote optimal processing of the individual epitopes as the polyepitopic protein encoded by the minigene is expressed. Details of methods of epitope ordering and incorporating spacer sequences between one or more epitopes to create an optimal polyepitopic minigene sequence are provided, for example, in PCT Publication Nos. WO01/47541 and WO02/083714, each of which is hereby incorporated by reference in its entirety.

[0509] The invention provides a method and system for optimizing the efficacy of multi-epitope vaccines so as to minimize the number of junctional epitopes and maximize, or at least increase, the immunogenicity and/or antigenicity of multi-epitope vaccines. In particular, the present invention provides multi-epitope nucleic acid constructs encoding a plurality of CTL and/or HTL epitopes obtained or derived from HPV Types 16, 18, 31, 33, 45, 52, 56, and/or 58.

[0510] In one embodiment of the invention, a computerized method for designing a multi-epitope construct having multiple epitopes includes the steps of: storing a plurality of input parameters in a memory of a computer system, the input parameters including a plurality of epitopes, at least one motif for identifying junctional epitopes, a plurality of amino acid insertions and at least one enhancement weight value for each insertion; generating a list of epitope pairs from the plurality of epitopes; determining for each epitope pair at least one optimum combination of amino acid insertions based on the at least one motif, the plurality of insertions and the at least one enhancement weight value for each insertion; and identifying at least one optimum arrangement of the plurality of epitopes, wherein a respective one of the at least one optimum combination of amino acid insertions is inserted at a respective junction of two epitopes, so as to provide an optimized multi-epitope construct. In a preferred embodiment, the step of identifying at least one optimum arrangement of epitopes may be accomplished by performing either an exhaustive search wherein all permutations of arrangements of the plurality of epitopes are evaluated or a stochastic search wherein only a subset of all permutations of arrangements of the plurality of epitopes are evaluated.

[0511] In a further embodiment, the method determines for each epitope pair at least one optimum combination of amino acid insertions by calculating a function value (F) for each possible combination of insertions for each epitope pair, wherein the number of insertions in a combination may range from 0 to a maximum number of insertions (MaxInsertions) value input by a user, and the function value is calculated in accordance with the equation F=(C+N)/J, when J>0, and F=2(C+N), when J=0, wherein C equals the enhancement weight value of a C+1 flanking amino acid, N equals the enhancement weight value of an N−1 flanking amino acid, and J equals the number of junctional epitopes detected for each respective combination of insertions in an epitope pair based on said at least one motif.

[0512] In another embodiment of the invention, a computer system for designing a multi-epitope construct having multiple epitopes, includes: a memory for storing a plurality of input parameters such as a plurality of epitopes, at least one motif for identifying junctional epitopes, a plurality of amino acid insertions and at least one enhancement weight value for each insertion; a processor for retrieving the input parameters from memory and generating a list of epitope pairs from the plurality of epitopes; wherein the processor further determines for each epitope pair at least one optimum combination of amino acid insertions, based on the at least one motif, the plurality of insertions and the at least one enhancement weight value for each insertion. The processor further identifies at least one optimum arrangement of the plurality of epitopes, wherein a respective one of the optimum combinations of amino acid insertions are inserted at a respective junction of two epitopes, to provide an optimized multi-epitope construct; and a display monitor, coupled to the processor, for displaying at least one optimum arrangement of the plurality of epitopes to a user.

[0513] In a further embodiment, the invention provides a data storage device storing a computer program for designing a multi-epitope construct having multiple epitopes, the computer program, when executed by a computer system, performing a process that includes the steps of: retrieving a plurality of input parameters from a memory of a computer system, the input parameters including, for example, a plurality of epitopes, at least one motif for identifying junctional epitopes, a plurality of amino acid insertions and at least one enhancement weight value for each insertion; generating a list of epitope pairs from the plurality of epitopes; determining for each epitope pair at least one optimum combination of amino acid insertions based on the at least one motif, the plurality of insertions and the at least one enhancement weight value for each insertion; and identifying at least one optimum arrangement of the plurality of epitopes, wherein a respective one of the at least one optimum combination of amino acid insertions is inserted at a respective junction of two epitopes, so as to provide an optimized multi-epitope construct.

[0514] In another embodiment, the invention provides a method and system for designing a multi-epitope construct that comprises multiple epitopes. The method comprising steps of: (a) sorting the multiple epitopes to minimize the number of junctional epitopes; (b) introducing a flanking amino acid residue at a C+1 position of an epitope to be included within the multi-epitope construct; (c) introducing one or more amino acid spacer residues between two epitopes of the multi-epitope construct, wherein the spacer prevents the occurrence of a junctional epitope; and, (d) selecting one or more multi-epitope constructs that have a minimal number of junctional epitopes, a minimal number of amino acid spacer residues, and a maximum number of flanking amino acid residues at a C+1 position relative to each epitope. In some embodiments, the spacer residues are independently selected from residues that are not known HLA Class II primary anchor residues. In particular embodiments, introducing the spacer residues prevents the occurrence of an HTL epitope. Such a spacer often comprises at least 5 amino acid residues independently selected from the group consisting of G, P, and N. In some embodiments the spacer is GPGPG (SEQ ID NO:______).

[0515] In some embodiments, introducing the spacer residues prevents the occurrence of a CTL epitope and further, wherein the spacer is 1, 2, 3, 4, 5, 6, 7 or 8 amino acid residues independently selected from the group consisting of A and G. Often, the flanking residue is introduced at the C+1 position of a CTL epitope and is selected from the group consisting of K, R, N, G, and A. In some embodiments, the flanking residue is adjacent to the spacer sequence. The method of the invention can also include substituting an N-terminal residue of an epitope that is adjacent to a C-terminus of an adjacent epitope within the multi-epitope construct with a residue selected from the group consisting of K, R, N, G, and A.

[0516] In some embodiments, the method of the invention can also comprise a step of predicting a structure of the multi-epitope construct, and further, selecting one or more constructs that have a maximal structure, i.e., that are processed by an HLA processing pathway to produce all of the epitopes comprised by the construct. In some embodiments, the multi-epitope construct encodes HPV-64 gene 1 (see Table 38, Panel A), HPV-64 gene 2 (see Table 38, Panel B), HPV-43 gene 3 (see Table 38, Panel C), HPV-43 gene 4 (see Table 38, Panel D), HPV-64 gene 1R (see Table 41, Panel A), HPV-64 gene 2R (see Table 41, Panel B), HPV-43 gene 3R (see Table 41, Panel C), and HPV-43 gene 4R (see Table 41, Panel D); HPV-43 gene 3RC (see Table 44, Panel A); HPV-43 gene 3RN (see Table 44, Panel B); HPV-43 gene 3RNC (see Table 44, Panel C); HPV-43 gene 4R; HPV-43 gene 4RC (see Table 44, Panel D); HPV-43-4RN (see Table 44, Panel E); HPV-43-4RNC (see Table 44, Panel F); HPV-46-5 (see Table 47, Panel A); HPV-46-6 (see Table 47, Panel b); HPV-46-5.2 (see Table 47, Panel C); HPV-47-1 (see Table 52, Panel A); HPV-47-2 (see Table 52, Panel B); HPV E1/E2 HTL constructs 780-21.1, 780-22.1 (see Table 59), 780-21.1 Fix, and 780-22.1 Fix (see Table 60); HPV-47-1 (CTL)/780.21.1 (HTL) (see Table 63, Panel A); HPV-47-1 (CTL)/780.22.1 (HTL) (see Table 63, Panel B); HPV-47-2 (CTL)/780.21.1 (HTL) (see Table 63, Panel C); HPV-47-1 (CTL)/780.22.1 (HTL) (see Table 63, Panel D); or HPV-64-2R (see Table 66); HPV-47-5 (see Table 69 and 83); HPV46 gene 5.2/HTL-20 (see Table 70); HPV46 gene 5.2/GP-HTL-20 (see Table 72C-D); HPV46 gene 5.3/HTL-20 (see Table 71); HPV46 gene 5.3/GP-HTL-20 (see Table 72G-H); HPV46 gene 5.3 optimized A24 (see Table 85); HPV47-3 (E1/E2) (see Table 74); HPV47-4 (E1/E2) (see Table 75); HPV E2/E2 HTL-24 (see Table 78); HPV E1/E2 47-2/HTL-24 (see Table 84); or HPV HTL-30 (see Table 80).

[0517] In another embodiment of the invention, a system for optimizing multi-epitope constructs include a computer system having a processor (e.g., central processing unit) and at least one memory coupled to the processor for storing instructions executed by the processor and data to be manipulated (i.e., processed) by the processor. The computer system further includes an input device (e.g., keyboard) coupled to the processor and the at least one memory for allowing a user to input desired parameters and information to be accessed by the processor. The processor may be a single CPU or a plurality of different processing devices/circuits integrated onto a single integrated circuit chip. Alternatively, the processor may be a collection of discrete processing devices/circuits selectively coupled to one another via either direct wire/conductor connections or via a data bus. Similarly, the at least one memory may be one large memory device (e.g., EPROM), or a collection of a plurality of discrete memory devices (e.g., EEPROM, EPROM, RAM, DRAM, SDRAM, Flash, etc.) selectively coupled to one another for selectively storing data and/or program information (i.e., instructions executed by the processor). Those of ordinary skill in the art would easily be able to implement a desired computer system architecture to perform the operations and functions disclosed herein.

[0518] In one embodiment, the computer system includes a display monitor for displaying information, instructions, images, graphics, etc. The computer system receives user inputs via a keyboard. These user input parameters may include, for example, the number of insertions (i.e., flanking residues and spacer residues), the peptides to be processed, the C+1 and N−1 weighting values for each amino acid, and the motifs to use for searching for junctional epitopes. Based on these input values/parameters, the computer system executes a “Junctional Analyzer” software program which automatically determines the number of junctional epitope for each peptide pair and also calculates an “enhancement” value for each combination of flanking residues and spacers that may be inserted at the junction of each peptide pair. The results of the junctional analyzer program are then used in either an exhaustive or stochastic search program which determines the “optimal” combination or linkage of the entire set of peptides to create a multi-epitope polypeptide, or nucleic acids, having a minimal number of junctional epitopes and a maximum functional (e.g., immunogenicity) value.

[0519] In one embodiment, if the number of peptides to be processed by the computer system is less than fourteen, an exhaustive search program is executed by the computer system which examines all permutations of the peptides making up the polypeptide to find the permutation with the “best” or “optimal” function value. In one embodiment, the function value is calculated using the equation (Ce+Ne)/J when J is greater than zero and 2*(Ce+Ne) when J is equal to zero, where Ce is the enhancement “weight” value of an amino acid at the C+1 position of a peptide, Ne is the enhancement “weight” value of an amino acid at the N−1 position of a peptide, and J is the number of junctional epitopes contained in the polypeptide encoded by multi-epitope nucleic acid sequence. Thus, maximizing this function value will identify the peptide pairs having the least number of junctional epitopes and the maximum enhancement weight value for flanking residues. If the number of peptides to be processed is fourteen or more, the computer system executes a stochastic search program that uses a “Monte Carlo” technique to examine many regions of the permutation space to find the best estimate of the optimum arrangement of peptides (e.g., having the maximum function value).

[0520] In a further embodiment, the computer system allows a user to input parameter values which format or limit the output results of the exhaustive or stochastic search program. For example, a user may input the maximum number of results having the same function value (“MaxDuplicateFunctionValue=X”) to limit the number of permutations that are generated as a result of the search. Since it is possible for the search programs to find many arrangements that give the same function value, it may be desirable to prevent the output file from being filled by a large number of equivalent solutions. Once this limit is reached no more results are reported until a larger or “better” function value is found. As another example, the user may input the maximum number of “hits” per probe during a stochastic search process. This parameter prevents the stochastic search program from generating too much output on a single probe. In a preferred embodiment, the number of permutations examined in a single probe is limited by several factors: the amount of time set for each probe in the input text file; the speed of the computer, and the values of the parameters “MaxHitsPerProbe” and “MaxDuplicateFunctionValues.” The algorithms used to generate and select permutations for analysis may be in accordance with well-known recursive algorithms found in many computer science text books. For example, six permutations of three things taken three at a time would be generated in the following sequence: ABC; ACB; BAC; BCA; CBA; CAB. As a further example of an input parameter, a user may input how the stochastic search is performed, e.g., randomly, statistically or other methodology; the maximum time allowed for each probe (e.g., 5 minutes); and the number of probes to perform.

[0521] Also disclosed herein are multi-epitope constructs designed by the methods described above and hereafter. The multi-epitope constructs include spacer nucleic acids between a subset of the epitope nucleic acids or all of the epitope nucleic acids. One or more of the spacer nucleic acids may encode amino acid sequences different from amino acid sequences encoded by other spacer nucleic acids to optimize epitope processing and to minimize the presence of junctional epitopes.

[0522] The minigene sequence may be converted to DNA by assembling oligonucleotides that encode the plus and minus strands of the minigene. Overlapping oligonucleotides (30-100 bases long) may be synthesized, phosphorylated, purified and annealed under appropriate conditions using well known techniques. The ends of the oligonucleotides can be joined, for example, using T4 DNA ligase. This synthetic minigene, encoding the epitope polypeptide, can then be cloned into a desired expression vector.

[0523] Standard regulatory sequences well known to those of skill in the art are preferably included in the vector to ensure expression in the target cells. Several vector elements are desirable: a promoter with a down-stream cloning site for minigene insertion; a polyadenylation signal for efficient transcription termination; an E. coli origin of replication; and an E. coli selectable marker (e.g. ampicillin or kanamycin resistance). Numerous promoters can be used for this purpose, e.g., the human cytomegalovirus (hCMV) promoter. Additional suitable transcriptional regulartory sequences are well-known in the art (see, e.g., U.S. Pat. Nos. 5,580,859 and 5,589,466 for other suitable promoter sequences.

[0524] Additional vector modifications may be desired to optimize minigene expression and immunogenicity. In some cases, introns are required for efficient gene expression, and one or more synthetic or naturally-occurring introns could be incorporated into the transcribed region of the minigene. The inclusion of mRNA stabilization sequences and sequences for replication in mammalian cells may also be considered for increasing minigene expression.

[0525] Once an expression vector is selected, the minigene is cloned into the polylinker region downstream of the promoter. This plasmid is transformed into an appropriate E. coli strain, and DNA is prepared using standard techniques. The orientation and DNA sequence of the minigene, as well as all other elements included in the vector, are confirmed using restriction mapping and DNA sequence analysis. Bacterial cells harboring the correct plasmid can be stored as a master cell bank and a working cell bank.

[0526] In addition, immunostimulatory sequences (ISSs or CpGs) appear to play a role in the immunogenicity of DNA vaccines. These sequences may be included in the vector, outside the minigene coding sequence, if desired to enhance immunogenicity.

[0527] In some embodiments, a bi-cistronic expression vector which allows production of both the minigene-encoded epitopes and a second protein (included to enhance or decrease immunogenicity) can be used. Examples of proteins or polypeptides that could beneficially enhance the immune response if co-expressed include cytokines (e.g., IL-2, IL-12, GM-CSF), cytokine-inducing molecules (e.g., LeIF), costimulatory molecules, or for HTL responses, pan-DR binding proteins (i.e., PADRES universal helper T cell epitopes, Epimmune, San Diego, Calif.). Helper (HTL) epitopes can be joined to intracellular targeting signals and expressed separately from expressed CTL epitopes; this allows direction of the HTL epitopes to a cell compartment different than that of the CTL epitopes. If required, this could facilitate more efficient entry of HTL epitopes into the HLA class II pathway, thereby improving HTL induction. In contrast to HTL or CTL induction, specifically decreasing the immune response by co-expression of immunosuppressive molecules (e.g. TGF-β) may be beneficial in certain diseases.

[0528] Therapeutic quantities of plasmid DNA can be produced for example, by fermentation in E. coli, followed by purification. Aliquots from the working cell bank are used to inoculate growth medium, and grown to saturation in shaker flasks or a bioreactor according to well known techniques. Plasmid DNA can be purified using standard bioseparation technologies such as solid phase anion-exchange resins supplied by QIAGEN, Inc. (Valencia, Calif.). If required, supercoiled DNA can be isolated from the open circular and linear forms using gel electrophoresis or other methods.

[0529] Purified plasmid DNA can be prepared for injection using a variety of formulations. The simplest of these is reconstitution of lyophilized DNA in sterile phosphate-buffer saline (PBS). This approach, known as “naked DNA,” is currently being used for intramuscular (IM) administration in clinical trials. See, e.g., U.S. Pat. Nos. 5,580,859, 5,589,466, 6,214,804, and 6,413,942. To improve the immunotherapeutic effects of minigene DNA vaccines to more therapeutically useful levels, an alternative method for formulating purified plasmid DNA may be desirable. A variety of methods have been described, and new techniques may become available. For example, purified plasmid DNA may be complexed with PVP to improve immunotherapeutic usefulness. Plasmid DNA in such formulations is not considered to be “naked DNA.” See, e.g., U.S. Pat. No. 6,040,295. Cationic lipids, glycolipids, and fusogenic liposomes can also be used in the formulation (see, e.g., as described by PCT Publication No. WO 93/24640; Mannino and Gould-Fogerite, BioTechniques 6(7): 682 (1988); U.S. Pat. No. 5,279,833; PCT Publication No. WO 91/06309; and Feigner, et al., Proc. Nat'l Acad. Sci. USA 84:7413 (1987). In addition, peptides and compounds referred to collectively as protective, interactive, non-condensing compounds (PINC) could also be complexed to purified plasmid DNA to influence variables such as stability, intramuscular dispersion, or trafficking to specific organs or cell types.

[0530] Target cell sensitization can be used as a functional assay for expression and HLA class I presentation of minigene-encoded CTL epitopes. For example, the plasmid DNA is introduced into a mammalian cell line that is suitable as a target for standard CTL chromium release or IFN-γ production assays. The transfection method used will be dependent on the final formulation. Electroporation can be used for “naked” DNA, whereas cationic lipids allow direct in vitro transfection. A plasmid expressing green fluorescent protein (GFP) can be co-transfected to allow enrichment of transfected cells using fluorescence activated cell sorting (FACS). These cells are then chromium-51 (⁵¹Cr) labeled and used as target cells for epitope-specific CTL lines; cytolysis, detected by ⁵¹Cr release, indicates both production of, and HLA presentation of, minigene-encoded CTL epitopes. Alternatively, IFN-γ production in response to Epitope presentation may be measured in an ELISPOT or ELISA assay. Expression of HTL epitopes may be evaluated in an analogous manner using assays to assess HTL activity.

[0531] In vivo immunogenicity is a second approach for functional testing of minigene DNA formulations. Transgenic mice expressing appropriate human HLA proteins are immunized with the DNA product. The dose and route of administration are formulation dependent (e.g., IM for DNA in PBS, intraperitoneal (“i.p.”) for lipid-complexed DNA). Twenty-one days after immunization, splenocytes are harvested and re-stimulated for one week in the presence of peptides encoding each epitope being tested. Thereafter, for CTL effector cells, assays are conducted for cytolysis of peptide-loaded, ⁵¹Cr-labeled target cells using standard techniques. Lysis of target cells that were sensitized by HLA loaded with peptide epitopes, corresponding to minigene-encoded epitopes, demonstrates DNA vaccine function for in vivo induction of CTLs. Alternatively, IFN-γ production in response to Epitope presentation may be measured in an ELISPOT or ELISA assay. Immunogenicity of HTL epitopes is evaluated in transgenic mice in an analogous manner.

[0532] Alternatively, the nucleic acids can be administered using ballistic delivery as described, for instance, in U.S. Pat. No. 5,204,253. Using this technique, particles comprised solely of DNA are administered. In a further alternative embodiment, DNA can be adhered to particles, such as gold particles.

[0533] Minigenes can also be delivered using other bacterial or viral delivery systems well known in the art, e.g., an expression construct encoding epitopes of the invention can be incorporated into a viral vector such as vaccinia.

Combinations of CTL Peptides with Helper Peptides

[0534] Vaccine compositions comprising CTL peptides of the invention can be modified to provide desired attributes, such as improved serum half life, broadened population coverage or enhanced immunogenicity.

[0535] For instance, the ability of a peptide to induce CTL activity can be enhanced by linking the peptide to a sequence which contains at least one epitope that is capable of inducing a T helper cell response. The use of T helper epitopes in conjunction with CTL epitopes to enhance immunogenicity is illustrated, for example, in the U.S. Pat. No. 6,419,931, which is hereby incorporated by reference in its entirety.

[0536] Although a CTL peptide can be directly linked to a T helper peptide, often CTL epitope/HTL epitope conjugates are linked by a spacer molecule. The spacer is typically comprised of relatively small, neutral molecules, such as amino acids or amino acid mimetics, which are substantially uncharged under physiological conditions. The spacers are typically selected from, e.g., Ala, Gly, or other neutral spacers of nonpolar amino acids or neutral polar amino acids. It will be understood that the optionally present spacer need not be comprised of the same residues and thus may be a hetero- or homo-oligomer. When present, the spacer will usually be at least one or two residues, more usually three to six residues and sometimes 10 or more residues. The CTL peptide epitope can be linked to the T helper peptide epitope either directly or via a spacer either at the amino or carboxy terminus of the CTL peptide. The amino terminus of either the immunogenic peptide or the T helper peptide may be acylated.

[0537] In certain embodiments, the T helper peptide is one that is recognized by T helper cells present in the majority of the population. This can be accomplished by selecting peptides that bind to many, most, or all of the HLA class II molecules. These are known as “loosely HLA-restricted” or “promiscuous” T helper sequences. Examples of amino acid sequences that are promiscuous include sequences from antigens such as tetanus toxoid at positions 830-843 (QYIKANSKFIGITE; SEQ ID NO: ______), Plasmodium falciparum circumsporozoite (CS) protein at positions 378-398 (DIEKKIAKMEKASSVFNVVNS; SEQ ID NO: ______), and Streptococcus 18 kD protein at positions 116 (GAVDSILGGVATYGAA; SEQ ID NO: ______). Other examples include peptides bearing a DR 1-4-7 supermotif, or either of the DR3 motifs.

[0538] Alternatively, it is possible to prepare synthetic peptides capable of stimulating T helper lymphocytes, in a loosely HLA-restricted fashion, using amino acid sequences not found in nature. These synthetic compounds called Pan-DR-binding epitopes (e.g., PADRE® universal helper T cell epitopes, Epimmune, Inc., San Diego, Calif.) are designed to most preferrably bind most HLA-DR (human HLA class II) molecules. For instance, a pan-DR-binding epitope peptide having the formula: aKXVAAWTLKAAa, where “X” is either cyclohexylalanine, phenylalanine, or tyrosine, and a is either D-alanine or L-alanine, has been found to bind to most HLA-DR alleles, and to stimulate the response of T helper lymphocytes from most individuals, regardless of their HLA type. An alternative of a pan-DR binding epitope comprises all “L” natural amino acids and can be provided in the form of nucleic acids that encode the epitope. PADRE® Universal T Helper cell epitopes are discussed supra in greater detail.

[0539] HTL peptide epitopes can also be modified to alter their biological properties. For example, they can be modified to include D-amino acids to increase their resistance to proteases and thus extend their serum half life, or they can be conjugated to other molecules such as lipids, proteins, carbohydrates, and the like to increase their biological activity. For example, a T helper peptide can be conjugated to one or more palmitic acid chains at either the amino or carboxyl termini.

Combinations of CTL Peptides with T Cell Priming Agents

[0540] In some embodiments it may be desirable to include in the pharmaceutical compositions of the invention at least one component which primes cytotoxic T lymphocytes. Lipids have been identified as agents capable of priming CTL in vivo against viral antigens. For example, palmitic acid residues can be attached to the ε- and α-amino groups of a lysine residue and then linked, e.g., via one or more linking residues such as Gly, Gly-Gly-, Ser, Ser-Ser, or the like, to an immunogenic peptide. The lipidated peptide can then be administered either directly in a micelle or particle, incorporated into a liposome, or emulsified in an adjuvant, e.g., incomplete Freund's adjuvant. In a preferred embodiment, a particularly effective immunogenic composition comprises palmitic acid attached to ε- and α-amino groups of Lys, which is attached via linkage, e.g., Ser-Ser, to the amino terminus of the immunogenic peptide.

[0541] As another example of lipid priming of CTL responses, E. coli lipoproteins, such as tripalmitoyl-S-glycerylcysteinlyseryl-serine (P₃CSS) can be used to prime virus specific CTL when covalently attached to an appropriate peptide (see, e.g., Deres, et al., Nature 342:561, 1989). Peptides of the invention can be coupled to P₃CSS, for example, and the lipopeptide administered to an individual to specifically prime a CTL response to the target antigen. Moreover, because the induction of neutralizing antibodies can also be primed with P₃CSS-conjugated epitopes, two such compositions can be combined to more effectively elicit both humoral and cell-mediated responses.

[0542] CTL and/or HTL peptides can also be modified by the addition of amino acids to the termini of a peptide to provide for ease of linking peptides one to another, for coupling to a carrier support or larger peptide, for modifying the physical or chemical properties of the peptide or oligopeptide, or the like. Amino acids such as tyrosine, cysteine, lysine, glutamic or aspartic acid, or the like, can be introduced at the C- or N-terminus of the peptide or oligopeptide, particularly class I peptides. However, it is to be noted that modification at the carboxyl terminus of a CTL epitope may, in some cases, alter binding characteristics of the peptide. In addition, the peptide or oligopeptide sequences can differ from the natural sequence by being modified by terminal-NH₂ acylation, e.g., by alkanoyl (C1-C20) or thioglycolyl acetylation, terminal-carboxylamidation, e.g., ammonia, methylamine, etc. In some instances these modifications may provide sites for linking to a support or other molecule.

Vaccine Compositions Comprising DC Pulsed with CTL and/or HTL Peptides

[0543] An embodiment of a vaccine composition in accordance with the invention comprises ex vivo administration of a cocktail of epitope-bearing peptides to PBMC, or isolated DC therefrom, from the patient's blood. A pharmaceutical to facilitate harvesting of DC can be used, such as Progenipoietin (Monsanto, St. Louis, Mo.) or GM-CSF/IL-4. After pulsing the DC with peptides and prior to reinfusion into patients, the DC are washed to remove unbound peptides. In this embodiment, a vaccine comprises peptide-pulsed DCs which present the pulsed peptide epitopes complexed with HLA molecules on their surfaces.

[0544] The DC can be pulsed ex vivo with a cocktail of peptides, some of which stimulate CTL responses to one or more HPV antigens of interest. Optionally, a helper T cell (HTL) peptide such as a PADRE® family molecule, can be included to facilitate the CTL response. Thus, a vaccine in accordance with the invention, preferably comprising epitopes from multiple HPV antigens, is used to treat HPV infection or cancer resulting from HPV infection.

Administration of Vaccines for Therapeutic or Prophylactic Purposes

[0545] The peptides of the present invention and pharmaceutical and vaccine compositions of the invention are typically used to treat and/or prevent cancer associated with HPV infection. Vaccine compositions containing the peptides of the invention are administered to a patient infected with HPV or to an individual susceptible to, or otherwise at risk for, HPV infection to elicit an immune response against HPV antigens and thus enhance the patient's own immune response capabilities.

[0546] As noted above, peptides comprising CTL and/or HTL epitopes of the invention induce immune responses when presented by HLA molecules and contacted with a CTL or HTL specific for an epitope comprised by the peptide. The peptides (or DNA encoding them) can be administered individually, as fusions of one or more peptide sequences or as combinations of individual peptides. The manner in which the peptide is contacted with the CTL or HTL is not critical to the invention. For instance, the peptide can be contacted with the CTL or HTL either in vivo or in vitro. If the contacting occurs in vivo, the peptide itself can be administered to the patient, or other vehicles, e.g., DNA vectors encoding one or more peptides, viral vectors encoding the peptide(s), liposomes and the like, can be used, as described herein.

[0547] When the peptide is contacted in vitro, the vaccinating agent can comprise a population of cells, e.g., peptide-pulsed dendritic cells, or HPV-specific CTLs, which have been induced by pulsing antigen-presenting cells in vitro with the peptide or by transfecting antigen-presenting cells with a minigene of the invention. Such a cell population is subsequently administered to a patient in a therapeutically effective dose.

[0548] In therapeutic applications, peptide and/or nucleic acid compositions are administered to a patient in an amount sufficient to elicit an effective CTL and/or HTL response to the virus antigen and to cure or at least partially arrest or slow symptoms and/or complications. An amount adequate to accomplish this is defined as “therapeutically effective dose.” Amounts effective for this use will depend on, e.g., the particular composition administered, the manner of administration, the stage and severity of the disease being treated, the weight and general state of health of the patient, and the judgment of the prescribing physician.

[0549] For pharmaceutical compositions, the immunogenic peptides of the invention, or DNA encoding them, are generally administered to an individual already infected with HPV. The peptides or DNA encoding them can be administered individually or as fusions of one or more peptide sequences. HPV-infected patients, with or without neoplasia, can be treated with the immunogenic peptides separately or in conjunction with other treatments, such as surgery, as appropriate.

[0550] For therapeutic use, administration should generally begin at the first diagnosis of HPV infection or HPV-associated cancer. This is followed by boosting doses until at least symptoms are substantially abated and for a period thereafter. The embodiment of the vaccine composition (i.e., including, but not limited to embodiments such as peptide cocktails, polyepitopic polypeptides, minigenes, or TAA-specific CTLs or pulsed dendritic cells) delivered to the patient may vary according to the stage of the disease or the patient's health status. For example, in a patient with a tumor that expresses HPV antigens, a vaccine comprising HPV-specific CTL may be more efficacious in killing tumor cells in patient with advanced disease than alternative embodiments.

[0551] Where susceptible individuals are identified prior to or during infection, the composition can be targeted to them, thus minimizing the need for administration to a larger population. Susceptible populations include those individuals who are sexually active.

[0552] The peptide or other compositions used for the treatment or prophylaxis of HPV infection can be used, e.g., in persons who have not manifested symptoms, e.g., genital warts or neoplastic growth. In this context, it is generally important to provide an amount of the peptide epitope delivered by a mode of administration sufficient to effectively stimulate a cytotoxic T cell response; compositions which stimulate helper T cell responses can also be given in accordance with this embodiment of the invention.

[0553] The dosage for an initial therapeutic immunization generally occurs in a unit dosage range where the lower value is about 1, 5, 50, 500, or 1,000 μg and the higher value is about 10,000, 20,000, 30,000 or 50,000 μg. Dosage values for a human typically range from about 500 μg to about 50,000 μg per 70 kilogram patient. Boosting dosages of between about 1.0 μg to about 50,000 μg of peptide pursuant to a boosting regimen over weeks to months may be administered depending upon the patient's response and condition as determined by measuring the specific activity of CTL and HTL obtained from the patient's blood. Administration should continue until at least clinical symptoms or laboratory tests indicate that the viral infection, or neoplasia, has been eliminated or reduced and for a period thereafter. The dosages, routes of administration, and dose schedules are adjusted in accordance with methodologies known in the art.

[0554] In certain embodiments, the peptides and compositions of the present invention are employed in serious disease states, that is, life-threatening or potentially life threatening situations. In such cases, as a result of the minimal amounts of extraneous substances and the relative nontoxic nature of the peptides in preferred compositions of the invention, it is possible and may be felt desirable by the treating physician to administer substantial excesses of these peptide compositions relative to these stated dosage amounts.

[0555] The vaccine compositions of the invention can also be used purely as prophylactic agents. Generally the dosage for an initial prophylactic immunization generally occurs in a unit dosage range where the lower value is about 1, 5, 50, 500, or 1,000 μg and the higher value is about 10,000, 20,000, 30,000 or 50,000 μg. Dosage values for a human typically range from about 500 μg to about 50,000 μl per 70 kilogram patient. This is followed by boosting dosages of between about 1.0 μg to about 50,000 μg of peptide administered at defined intervals from about four weeks to six months after the initial administration of vaccine. The immunogenicity of the vaccine can be assessed by measuring the specific activity of CTL and HTL obtained from a sample of the patient's blood.

[0556] The pharmaceutical compositions for therapeutic treatment are intended for parenteral, topical, oral, intrathecal, or local (e.g. as a cream or topical ointment) administration. Preferably, the pharmaceutical compositions are administered parentally, e.g., intravenously, subcutaneously, intradermally, or intramuscularly. Thus, the invention provides compositions for parenteral administration which comprise a solution of the immunogenic peptides dissolved or suspended in an acceptable carrier, preferably an aqueous carrier. A variety of aqueous carriers may be used, e.g., water, buffered water, 0.8% saline, 0.3% glycine, hyaluronic acid and the like. These compositions may be sterilized by conventional, well known sterilization techniques, or may be sterile filtered. The resulting aqueous solutions may be packaged for use as is, or lyophilized, the lyophilized preparation being combined with a sterile solution prior to administration. The compositions may contain pharmaceutically acceptable auxiliary substances as required to approximate physiological conditions, such as pH-adjusting and buffering agents, tonicity adjusting agents, wetting agents, preservatives, and the like, for example, sodium acetate, sodium lactate, sodium chloride, potassium chloride, calcium chloride, sorbitan monolaurate, triethanolamine oleate, etc.

[0557] The concentration of peptides of the invention in the pharmaceutical formulations can vary widely, i.e., from less than about 0.1%, usually at or at least about 2% to as much as 20% to 50% or more by weight, and will be selected primarily by fluid volumes, viscosities, etc., in accordance with the particular mode of administration selected.

[0558] A human unit dose form of the peptide composition is typically included in a pharmaceutical composition that comprises a human unit dose of an acceptable carrier, preferably an aqueous carrier, and is administered in a volume of fluid that is known by those of skill in the art to be used for administration of such compositions to humans (see, e.g., Remington's Pharmaceutical Sciences, 17^{th} Edition, A. Gennaro, Ed., Mack Publishing Co., Easton, Pa., 1985).

[0559] The peptides of the invention, and/or nucleic acids encoding the peptides, can also be administered via liposomes, which may also serve to target the peptides to a particular tissue, such as lymphoid tissue, or to target selectively to infected cells, as well as to increase the half-life of the peptide composition. Liposomes include emulsions, foams, micelles, insoluble monolayers, liquid crystals, phospholipid dispersions, lamellar layers and the like. In these preparations, the peptide to be delivered is incorporated as part of a liposome, alone or in conjunction with a molecule which binds to a receptor prevalent among lymphoid cells, such as monoclonal antibodies which bind to the CD45 antigen, or with other therapeutic or immunogenic compositions. Thus, liposomes either filled or decorated with a desired peptide of the invention can be directed to the site of lymphoid cells, where the liposomes then deliver the peptide compositions. Liposomes for use in accordance with the invention are formed from standard vesicle-forming lipids, which generally include neutral and negatively charged phospholipids and a sterol, such as cholesterol. The selection of lipids is generally guided by consideration of, e.g., liposome size, acid lability and stability of the liposomes in the blood stream. A variety of methods are available for preparing liposomes, as described in, e.g., Szoka, et al., Ann. Rev. Biophys. Bioeng. 9:467 (1980), and U.S. Pat. Nos. 4,235,871, 4,501,728, 4,837,028, and 5,019,369.

[0560] For targeting cells of the immune system, a ligand to be incorporated into the liposome can include, e.g., antibodies or fragments thereof specific for cell surface determinants of the desired immune system cells. A liposome suspension containing a peptide may be administered intravenously, locally, topically, etc. in a dose which varies according to, inter alia, the manner of administration, the peptide being delivered, and the stage of the disease being treated.

[0561] For solid compositions, conventional nontoxic solid carriers may be used which include, for example, pharmaceutical grades of mannitol, lactose, starch, magnesium stearate, sodium saccharin, talcum, cellulose, glucose, sucrose, magnesium carbonate, and the like. For oral administration, a pharmaceutically acceptable nontoxic composition is formed by incorporating any of the normally employed excipients, such as those carriers previously listed, and generally 10-95% of active ingredient, that is, one or more peptides of the invention, and more preferably at a concentration of 25%-75%.

[0562] For aerosol administration, the immunogenic peptides are preferably supplied in finely divided form along with a surfactant and propellant. Typical percentages of peptides are 0.01%-20% by weight, preferably 1%-10%. The surfactant must, of course, be nontoxic, and preferably soluble in the propellant. Representative of such agents are the esters or partial esters of fatty acids containing from 6 to 22 carbon atoms, such as caproic, octanoic, lauric, palmitic, stearic, linoleic, linolenic, olesteric and oleic acids with an aliphatic polyhydric alcohol or its cyclic anhydride. Mixed esters, such as mixed or natural glycerides may be employed. The surfactant may constitute 0.1%-20% by weight of the composition, preferably 0.25-5%. The balance of the composition is ordinarily propellant. A carrier can also be included, as desired, as with, e.g., lecithin for intranasal delivery.

HLA Expression: Implications for T Cell-Based Immunotherapy

[0563] Similarly, it is widely recognized that the pathological process by which an individual succumbs to a neoplastic disease is complex. During the course of disease, many changes occur in cancer cells. The tumor accumulates alterations which are in part related to dysfunctional regulation of growth and differentiation, but also related to maximizing its growth potential, escape from drug treatment and/or the body's immunosurveillance. Neoplastic disease results in the accumulation of several different biochemical alterations of cancer cells, as a function of disease progression. It also results in significant levels of intra- and inter-cancer heterogeneity, particularly in the late, metastatic stage.

[0564] Familiar examples of cellular alterations affecting treatment outcomes include the outgrowth of radiation or chemotherapy resistant tumors during the course of therapy. These examples parallel the emergence of drug resistant viral strains as a result of aggressive chemotherapy, e.g., of chronic HBV and HIV infection, and the current resurgence of drug resistant organisms that cause Tuberculosis and Malaria. It appears that significant heterogeneity of responses is also associated with other approaches to cancer therapy, including anti-angiogenesis drugs, passive antibody immunotherapy, and active T cell-based immunotherapy. Thus, in view of such phenomena, epitopes from multiple disease-related antigens can be used in vaccines and therapeutics thereby counteracting the ability of diseased cells to mutate and escape treatment.

[0565] One of the main factors contributing to the dynamic interplay between host and disease is the immune response mounted against the pathogen, infected cell, or malignant cell. In many conditions such immune responses control the disease. Several animal model systems and prospective studies of natural infection in humans suggest that immune responses against a pathogen can control the pathogen, prevent progression to severe disease and/or eliminate the pathogen. A common theme is the requirement for a multispecific T cell response, and that narrowly focused responses appear to be less effective. These observations guide the skilled artisan as to embodiments of methods and compositions of the present invention that provide for a broad immune response.

[0566] In the cancer setting there are several non-limiting findings that indicate that immune responses can impact neoplastic growth:
[0567] (a) the demonstration in many different animal models, that anti-tumor T cells, restricted by MHC class I, can prevent or treat tumors.
[0568] (b) encouraging results have come from immunotherapy trials.
[0569] (c) observations made in the course of natural disease correlated the type and composition of T cell infiltrate within tumors with positive clinical outcomes (Coulie P G, et al. Antitumor immunity at work in a melanoma patient In Advances in Cancer Research, 213-242, 1999).
[0570] (d) tumors commonly have the ability to mutate, thereby changing their immunological recognition. For example, the presence of mono-specific CTL was also correlated with control of tumor growth, until antigen loss emerged (Riker, A., et al., Surgery, 126(2):112-20, 1999; Marchand, M., et al., Int. J. Cancer 80(2):219-30, 1999). Similarly, loss of beta 2 microglobulin was detected in 5/13 lines established from melanoma patients after receiving immunotherapy at the National Cancer Institute (Restifo, N. P., et al., Loss of functional Beta2-microglobulin in metastatic melanomas from five patients receiving immunotherapy J. Nat'l Cancer Inst., 88 (2): 100-08, 1996). It has long been recognized that HLA class I is frequently altered in various tumor types. This has led to a hypothesis that this phenomenon might reflect immune pressure exerted on the tumor by means of class I restricted CTL. The extent and degree of alteration in HLA class I expression appears to be reflective of past immune pressures, and may also have prognostic value (van Duinen, S. G., et al., Cancer Res. 48, 1019-25, 1988; Moller, P., et al., Cancer Res. 51, 729-36, 1991).

[0571] Taken together, these observations provide a rationale for immunotherapy of cancer and infectious disease, and suggest that effective strategies need to account for the complex series of pathological changes associated with disease.

[0572] The level and pattern of expression of HLA class I antigens in tumors has been studied in many different tumor types and alterations have been reported in all types of tumors studied. The molecular mechanisms underlining HLA class I alterations have been demonstrated to be quite heterogeneous. They include alterations in the TAP/processing pathways, mutations of β2-microglobulin and specific HLA heavy chains, alterations in the regulatory elements controlling over class I expression and loss of entire chromosome sections. There are several reviews on this topic, see, e.g., Garrido, F., et al., Immunol. Today 14(10):491-99, 1993; Kaklamanis, L., et al., Int. J. Cancer, 51(3):379-85, 1992. There are three main types of HLA Class I alteration (complete loss, allele-specific loss and decreased expression). The functional significance of each alteration is discussed separately.

[0573] Complete loss of HLA expression can result from a variety of different molecular mechanisms, reviewed in (Algarra, I., et al., Human Immunol. 61, 65-73, 2000; Browning, M., et al., Tissue Antigens 47:364-71, 1996; Ferrone, S., et al., Immunol. Today, 16(10): 487-94, 1995; Garrido, F., et al., Immunol. Today 14(10):491-99, 1993; Tait, B. D., Hum. Immunol. 61, 158-65, 2000). In functional terms, this type of alteration has several important implications.

[0574] While the complete absence of class I expression will eliminate CTL recognition of those tumor cells, the loss of HLA class I will also render the tumor cells extraordinary sensitive to lysis from NK cells (Ohnmacht, G. A., et al., J. Cell. Phys. 182:332-38, 2000; Liunggren, H. G., et al., J. Exp. Med., 162(6):1745-59, 1985; Maio, M., et al., J. Clin. Invest. 88(1):282-89, 1991; Schrier, P. I., et al., Adv. Cancer Res., 60:181-246, 1993).

[0575] The complementary interplay between loss of HLA expression and gain in NK sensitivity is exemplified by the classic studies of Coulie and coworkers (in Advances in Cancer Research, 213-242, 1999) which described the evolution of a patient's immune response over the course of several years. Because of increased sensitivity to NK lysis, it is predicted that approaches leading to stimulation of innate immunity in general and NK activity in particular would be of special significance. An example of such an approach is the induction of large amounts of dendritic cells (DC) by various hematopoietic growth factors, such as Flt3 ligand or ProGP. The rationale for this approach resides in the well known fact that dendritic cells produce large amounts of IL-12, one of the most potent stimulators for innate immunity and NK activity in particular. Alternatively, IL-12 is administered directly, or as nucleic acids that encode it. In this light, it is interesting to note that Flt3 ligand treatment results in transient tumor regression of a class I negative prostate murine cancer model (Ciavarra, R. P., et al., Cancer Res 60:2081-84, 2000). In this context, specific anti-tumor vaccines in accordance with the invention synergize with these types of hematopoietic growth factors to facilitate both CTL and NK cell responses, thereby appreciably impairing a cell's ability to mutate and thereby escape efficacious treatment. Thus, an embodiment of the present invention comprises a composition of the invention together with a method or composition that augments functional activity or numbers of NK cells. Such an embodiment can comprise a protocol that provides a composition of the invention sequentially with an NK-inducing modality, or contemporaneous with an NK-inducing modality.

[0576] Secondly, complete loss of HLA frequently occurs only in a fraction of the tumor cells, while the remainder of tumor cells continue to exhibit normal expression. In functional terms, the tumor would still be subject, in part, to direct attack from a CTL response; the portion of cells lacking HLA subject to an NK response. Even if only a CTL response were used, destruction of the HLA expressing fraction of the tumor has dramatic effects on survival times and quality of life.

[0577] It should also be noted that in the case of heterogeneous HLA expression, both normal HLA-expressing as well as defective cells are predicted to be susceptible to immune destruction based on “bystander effects.” Such effects were demonstrated, e.g., in the studies of Rosendahl and colleagues that investigated in vivo mechanisms of action of antibody targeted superantigens (J. Immunol. 160(11):5309-13, 1998). The bystander effect is understood to be mediated by cytokines elicited from, e.g., CTLs acting on an HLA-bearing target cell, whereby the cytokines are in the environment of other diseased cells that are concomitantly killed.

[0578] One of the most common types of alterations in class I molecules is the selective loss of certain alleles in individuals heterozygous for HLA. Allele-specific alterations might reflect the tumor adaptation to immune pressure, exerted by an immunodominant response restricted by a single HLA restriction element. This type of alteration allows the tumor to retain class I expression and thus escape NK cell recognition, yet still be susceptible to a CTL-based vaccine in accordance with the invention which comprises epitopes corresponding to the remaining HLA type. Thus, a practical solution to overcome the potential hurdle of allele-specific loss relies on the induction of multispecific responses. Just as the inclusion of multiple disease-associated antigens in a vaccine of the invention guards against mutations that yield loss of a specific disease antigens, simultaneously targeting multiple HLA specificities and multiple disease-related antigens prevents disease escape by allele-specific losses.

[0579] The sensitivity of effector CTL has long been demonstrated (Brower, R. C., et al., Mol. Immunol., 31; 1285-93, 1994; Chriustnick, E. T., et al., Nature 352:67-70, 1991; Sykulev, Y., et al., Immunity, 4(6):565-71, 1996). Even a single peptide/MHC complex can result in tumor cells lysis and release of anti-tumor lymphokines. The biological significance of decreased HLA expression and possible tumor escape from immune recognition is not fully known. Nevertheless, it has been demonstrated that CTL recognition of as few as one MHC/peptide complex is sufficient to lead to tumor cell lysis.

[0580] Further, it is commonly observed that expression of HLA can be upregulated by gamma IFN, commonly secreted by effector CTL. Additionally, HLA class I expression can be induced in vivo by both alpha and beta IFN (Halloran, et al., J. Immunol. 148:3837, 1992; Pestka, S., et al., Annu. Rev. Biochem. 56:727-77, 1987). Conversely, decreased levels of HLA class I expression also render cells more susceptible to NK lysis.

[0581] With regard to gamma IFN, Torres, et al. (Tissue Antigens 47:372-81, 1996) note that HLA expression is upregulated by IFN-γ in pancreatic cancer, unless a total loss of haplotype has occurred. Similarly, Rees and Mian note that allelic deletion and loss can be restored, at least partially, by cytokines such as IFN-γ (Cancer Immunol. Immunother. 48:374-81, 1999). It has also been noted that IFN-γ treatment results in upregulation of class I molecules in the majority of the cases studied (Browning, M., et al., Tissue Antigens 47:364-71, 1996). Kaklamakis, et al., also suggested that adjuvant immunotherapy with IFN-γ may be beneficial in the case of HLA class I negative tumors (Kaklamanis, L., Cancer Res. 55:5191-94, 1995). It is important to underline that IFN-gamma production is induced and self-amplified by local inflammation/immunization (Halloran, et al., J. Immunol. 148:3837, 1992), resulting in large increases in MHC expressions even in sites distant from the inflammatory site.

[0582] Finally, studies have demonstrated that decreased HLA expression can render tumor cells more susceptible to NK lysis (Ohnmacht, G. A., et al., J. Cell. Phys. 182:332-38, 2000; Liunggren, H. G., et al., J. Exp. Med., 162(6):1745-59, 1985; Maio, M., et al., J. Clin. Invest. 88(1):282-89, 1991; Schrier, P. I., et al., Adv. Cancer Res., 60:181-246, 1993). If decreases in HLA expression benefit a tumor because it facilitates CTL escape, but render the tumor susceptible to NK lysis, then a minimal level of HLA expression that allows for resistance to NK activity would be selected for (Garrido, F., et al., Immunol Today 18(2):89-96, 1997). Therefore, a therapeutic compositions or methods in accordance with the invention together with a treatment to upregulate HLA expression and/or treatment with high affinity T-cells renders the tumor sensitive to CTL destruction.

[0583] The frequency of alterations in class I expression is the subject of numerous studies (Algarra, I., et al., Human Immunol. 61, 65-73, 2000). Rees and Mian estimate allelic loss to occur overall in 3-20% of tumors, and allelic deletion to occur in 15-50% of tumors. It should be noted that each cell carries two separate sets of class I genes, each gene carrying one HLA-A and one HLA-B locus. Thus, fully heterozygous individuals carry two different HLA-A molecules and two different HLA-B molecules. Accordingly, the actual frequency of losses for any specific allele could be as little as one quarter of the overall frequency. They also note that, in general, a gradient of expression exists between normal cells, primary tumors and tumor metastasis. In a study from Natali and coworkers (Proc. Natl. Acad. Sci. U.S.A. 86:6719-23, 1989), solid tumors were investigated for total HLA expression, using W6/32 antibody, and for allele-specific expression of the A2 antigen, as evaluated by use of the BB7.2 antibody. Tumor samples were derived from primary cancers or metastasis, for 13 different tumor types, and scored as negative if less than 20%, reduced if in the 30-80% range, and normal above 80%. All tumors, both primary and metastatic, were HLA positive with W6/32. In terms of A2 expression, a reduction was noted in 16.1% of the cases, and A2 was scored as undetectable in 39.4% of the cases. Garrido and coworkers (Immunol. Today 14(10):491-99, 1993) emphasize that HLA changes appear to occur at a particular step in the progression from benign to most aggressive. Jiminez et al (Cancer Immunol. Immunother. 48:684-90, 2000) have analyzed 118 different tumors (68 colorectal, 34 laryngeal and 16 melanomas). The frequencies reported for total loss of HLA expression were 11% for colon, 18% for melanoma and 13% for larynx. Thus, HLA class I expression is altered in a significant fraction of the tumor types, possibly as a reflection of immune pressure, or simply a reflection of the accumulation of pathological changes and alterations in diseased cells.

[0584] A majority of the tumors express HLA class I, with a general tendency for the more severe alterations to be found in later stage and less differentiated tumors. This pattern is encouraging in the context of immunotherapy, especially considering that: 1) the relatively low sensitivity of immunohistochemical techniques might underestimate HLA expression in tumors; 2) class I expression can be induced in tumor cells as a result of local inflammation and lymphokine release; and, 3) class I negative cells are sensitive to lysis by NK cells.

[0585] Accordingly, various embodiments of the present invention can be selected in view of the fact that there can be a degree of loss of HLA molecules, particularly in the context of neoplastic disease. For example, the treating physician can assay a patient's tumor to ascertain whether HLA is being expressed. If a percentage of tumor cells express no class I HLA, then embodiments of the present invention that comprise methods or compositions that elicit NK cell responses can be employed. As noted herein, such NK-inducing methods or composition can comprise a Flt3 ligand or ProGP which facilitate mobilization of dendritic cells, the rationale being that dendritic cells produce large amounts of IL-12. IL-12 can also be administered directly in either amino acid or nucleic acid form. It should be noted that compositions in accordance with the invention can be administered concurrently with NK cell-inducing compositions, or these compositions can be administered sequentially.

[0586] In the context of allele-specific HLA loss, a tumor retains class I expression and may thus escape NK cell recognition, yet still be susceptible to a CTL-based vaccine in accordance with the invention which comprises epitopes corresponding to the remaining HLA type. The concept here is analogous to embodiments of the invention that include multiple disease antigens to guard against mutations that yield loss of a specific antigen. Thus, one can simultaneously target multiple HLA specificities and epitopes from multiple disease-related antigens to prevent tumor escape by allele-specific loss as well as disease-related antigen loss. In addition, embodiments of the present invention can be combined with alternative therapeutic compositions and methods. Such alternative compositions and methods comprise, without limitation, radiation, cytotoxic pharmaceuticals, and/or compositions/methods that induce humoral antibody responses.

[0587] Moreover, it has been observed that expression of HLA can be upregulated by gamma IFN, which is commonly secreted by effector CTL, and that HLA class I expression can be induced in vivo by both alpha and beta IFN. Thus, embodiments of the invention can also comprise alpha, beta and/or gamma IFN to facilitate upregualtion of HLA.

Reprieve Periods from Therapies that Induce Side Effects: “Scheduled Treatment Interruptions or Drug Holidays”

[0588] Recent evidence has shown that certain patients infected with a pathogen, whom are initially treated with a therapeutic regimen to reduce pathogen load, have been able to maintain decreased pathogen load when removed from the therapeutic regimen, i.e., during a “drug holiday” (Rosenberg, E., et al., Nature 407:523-26, Sep. 28, 2000). As appreciated by those skilled in the art, many therapeutic regimens for both pathogens and cancer have numerous, often severe, side effects. During the drug holiday, the patient's immune system is keeping the disease in check. Methods for using compositions of the invention are used in the context of drug holidays for cancer and pathogenic infection.

[0589] For treatment of an infection, where therapies are not particularly immunosuppressive, compositions of the invention are administered concurrently with the standard therapy. During this period, the patient's immune system is directed to induce responses against the epitopes comprised by the present inventive compositions. Upon removal from the treatment having side effects, the patient is primed to respond to the infectious pathogen should the pathogen load begin to increase. Composition of the invention can be provided during the drug holiday as well.

[0590] For patients with cancer, many therapies are immunosuppressive. Thus, upon achievement of a remission or identification that the patient is refractory to standard treatment, then upon removal from the immunosuppressive therapy, a composition in accordance with the invention is administered. Accordingly, as the patient's immune system reconstitutes, precious immune resources are simultaneously directed against the cancer. Composition of the invention can also be administered concurrently with an immunosuppressive regimen if desired.

Kits

[0591] The peptide and nucleic acid compositions of this invention can be provided in kit form together with instructions for vaccine administration. Typically the kit would include desired peptide compositions in a container, preferably in unit dosage form and instructions for administration. An alternative kit would include a minigene construct with desired polynucleotides of the invention in a container, preferably in unit dosage form together with instructions for administration. Lymphokines or polynucleotides encoding them such as IL-2 or IL-12 may also be included in the kit. Other kit components that may also be desirable include, for example, a sterile syringe, booster dosages, and other desired excipients.

Overview

[0592] Epitopes in accordance with the present invention were successfully used to induce an immune response. Immune responses with these epitopes have been induced by administering the epitopes in various forms. The epitopes have been administered as peptides, as polynucleotides, and as viral vectors comprising nucleic acids that encode the epitope(s) of the invention. Upon administration of peptide-based epitope forms, immune responses have been induced by direct loading of an epitope onto an empty HLA molecule that is expressed on a cell, and via internalization of the epitope and processing via the HLA class I pathway; in either event, the HLA molecule expressing the epitope was then able to interact with and induce a CTL response. Peptides can be delivered directly or using such agents as liposomes. They can additionally be delivered using ballistic delivery, in which the peptides are typically in a crystalline form. When DNA is used to induce, an immune response, it is administered either as naked DNA or as DNA complexed to a polymer (e.g., PVP) or with a lipid, generally in a dose range of approximately 1-5 mg, or via the ballistic “gene gun” delivery, typically in a dose range of approximately 10-100 μg. The DNA can be delivered in a variety of conformations, e.g., linear, circular etc. Various viral vectors have also successfully been used that comprise nucleic acids which encode epitopes in accordance with the invention.

[0593] Accordingly compositions in accordance with the invention exist in several forms. Embodiments of each of these composition forms in accordance with the invention have been successfully used to induce an immune response.

[0594] One composition in accordance with the invention comprises a plurality of peptides. This plurality or cocktail of peptides is generally admixed with one or more pharmaceutically acceptable excipients. The peptide cocktail can comprise multiple copies of the same peptide or can comprise a mixture of peptides. One or more of the peptides can be analogs of naturally occurring epitopes. The peptides can comprise artificial amino acids and/or chemical modifications such as addition of a surface active molecule, e.g., lipidation; acetylation, glycosylation, biotinylation, phosphorylation etc. The peptides can be CTL or HTL epitopes. In a preferred embodiment the peptide cocktail comprises a plurality of different CTL epitopes and at least one HTL epitope. The HTL epitope can be naturally or non-naturally occurring (e.g., the PADRE® universal HTL epitope, Epimmune Inc., San Diego, Calif.). The number of distinct epitopes in an embodiment of the invention is generally a whole unit integer from one through one hundred fifty (e.g., 1, 2, 3, 4, 5, 6, 7, 8, 9, 10, 11, 12, 13, 14, 15, 16, 17, 18, 19, 20, 21, 22, 23, 24, 25, 26, 27, 28, 29, 30, 31, 32, 33, 34, 35, 36, 37, 38, 39, 40, 41, 42, 43, 44, 45, 46, 47, 48, 49, 50, 51, 52, 53, 54, 55, 56, 57, 58, 59, 60, 61, 62, 63, 64, 65, 66, 67, 68, 69, 70, 71, 72, 73, 74, 75, 76, 77, 78, 79, 80, 81, 82, 83, 84, 85, 86, 87, 88, 89, 90, 91, 92, 93, 94, 95, 96, 97, 98, 99, 100 or 150).

[0595] An additional embodiment of a composition in accordance with the invention comprises a polypeptide multi-epitope construct, i.e., a polyepitopic peptide. Polyepitopic peptides in accordance with the invention are prepared by use of technologies well-known in the art. By use of these known technologies, epitopes in accordance with the invention are connected one to another. The polyepitopic peptides can be linear or non-linear, e.g., multivalent. These polyepitopic constructs can comprise artificial amino acid residue, spacing or spacer amino acid residues, flanking amino acid residues, or chemical modifications between adjacent epitope units. The polyepitopic construct can be a heteropolymer or a homopolymer. The polyepitopic constructs generally comprise epitopes in a quantity of any whole unit integer between 2-150 (e.g., 2, 3, 4, 5, 6, 7, 8, 9, 10, 11, 12, 13, 14, 15, 16, 17, 18, 19, 20, 21, 22, 23, 24, 25, 26, 27, 28, 29, 30, 31, 32, 33, 34, 35, 36, 37, 38, 39, 40, 41, 42, 43, 44, 45, 46, 47, 48, 49, 50, 51, 52, 53, 54, 55, 56, 57, 58, 59, 60, 61, 62, 63, 64, 65, 66, 67, 68, 69, 70, 71, 72, 73, 74, 75, 76, 77, 78, 79, 80, 81, 82, 83, 84, 85, 86, 87, 88, 89, 90, 91, 92, 93, 94, 95, 96, 97, 98, 99, 100 or 150). In a preferred embodiment, the polyepitopic construct can comprise CTL and/or HTL epitopes. The HTL epitope can be naturally or non-naturally (e.g., the PADRE® Universal HTL epitope, Epimmune Inc., San Diego, Calif.). One or more of the epitopes in the construct can be modified, e.g., by addition of a surface active material, e.g. a lipid, or chemically modified, e.g., acetylation, etc. Moreover, bonds in the multi-epitopic construct can be other than peptide bonds, e.g., covalent bonds, ester or ether bonds, disulfide bonds, hydrogen bonds, ionic bonds etc.

[0596] Alternatively, a composition in accordance with the invention comprises a construct which comprises a series, sequence, stretch, etc., of amino acids that have homology to or identity with (i.e., corresponds to or is contiguous with) to a native sequence. This stretch of amino acids comprises at least one subsequence of amino acids that, if cleaved or isolated from the longer series of amino acids, functions as an HLA class I or HLA class II epitope in accordance with the invention. In this embodiment, the peptide sequence is modified, so as to become a construct as defined herein, by use of any number of techniques known or to be provided in the art. The polyepitopic constructs can contain homology to or exhibit identity with a naturally occurring sequence in any whole unit integer increment from 70-100%, e.g., 70, 71, 72, 73, 74, 75, 76, 77, 78, 79, 80, 81, 82, 83, 84, 85, 86, 87, 88, 89, 90, 91, 92, 93, 94, 95, 96, 97, 98, 99, or, 100 percent.

[0597] A further embodiment of a composition in accordance with the invention is an antigen presenting cell that comprises one or more epitopes in accordance with the invention. The antigen presenting cell can be a “professional” antigen presenting cell, such as a dendritic cell. The antigen presenting cell can comprise the epitope of the invention by any means known or to be determined in the art. Such means include pulsing of dendritic cells with one or more individual epitopes or with one or more peptides that comprise multiple epitopes, by polynucleotide administration such as ballistic DNA or by other techniques in the art for administration of nucleic acids, including vector-based, e.g. viral vector, delivery of polynucleotide.

[0598] Further embodiments of compositions in accordance with the invention comprise polynucleotides that encode one or more peptides of the invention, or polynucleotides that encode a polyepitopic peptide in accordance with the invention. As appreciated by one of ordinary skill in the art, various polynucleotide compositions will encode the same peptide due to the redundancy of the genetic code. Each of these polynucleotide compositions falls within the scope of the present invention. This embodiment of the invention comprises DNA or RNA, and in certain embodiments a combination of DNA and RNA. It is to be appreciated that any composition comprising polynucleotides that will encode a peptide in accordance with the invention or any other peptide based composition in accordance with the invention, falls within the scope of this invention.

[0599] It is to be appreciated that peptide-based forms of the invention (as well as the polynucleotides that encode them) can comprise analogs of epitopes of the invention generated using principles already known, or to be known, in the art. Principles related to analoging are now known in the art, and are disclosed herein; moreover, analoging principles (heteroclitic analoging) are disclosed in co-pending application serial number U.S. Ser. No. 09/226,775 filed 6 Jan. 1999. Generally the compositions of the invention are isolated or purified.

[0600] The invention will be described in greater detail by way of specific examples. The following examples are offered for illustrative purposes, and are not intended to limit the invention in any manner. Those of skill in the art will readily recognize a variety of non-critical parameters that can be changed or modified to yield alternative embodiments in accordance with the invention.

### EXAMPLES

### Example 1

### HLA Class I and Class II Binding Assays

[0601] The following example of peptide binding to HLA molecules demonstrates quantification of binding affinities of HLA class I and class II peptides. Binding assays can be performed with peptides that are either motif-bearing or not motif-bearing.

[0602] HLA class I and class II binding assays using purified HLA molecules were performed in accordance with disclosed protocols (e.g., PCT publications WO 94/20127 and WO 94/03205; Sidney, et al., Current Protocols in Immunology 18.3.1 (1998); Sidney, et al., J. Immunol. 154:247 (1995); Sette, et al., Mol. Immunol. 31:813 (1994)). Briefly, purified MHC molecules (5 to 500 nM) were incubated with various unlabeled peptide inhibitors and 1-10 nM ¹²⁵I-radiolabeled probe peptides as described. Following incubation, MHC-peptide complexes were separated from free peptide by gel filtration and the fraction of peptide bound was determined. Typically, in preliminary experiments, each MHC preparation was titered in the presence of fixed amounts of radiolabeled peptides to determine the concentration of HLA molecules necessary to bind 10-20% of the total radioactivity. All subsequent inhibition and direct binding assays were performed using these HLA concentrations.

[0603] Since under these conditions [label]<[HLA] and IC₅₀≧[HLA], the measured IC₅₀ values are reasonable approximations of the true K_{D} values. Peptide inhibitors are typically tested at concentrations ranging from 120 μg/ml to 1.2 ng/ml, and are tested in two to four completely independent experiments. To allow comparison of the data obtained in different experiments, a relative binding figure is calculated for each peptide by dividing the IC₅₀ of a positive control for inhibition by the IC₅₀ for each tested peptide (typically unlabeled versions of the radiolabeled probe peptide). For database purposes, and inter-experiment comparisons, relative binding values are compiled. These values can subsequently be converted back into IC₅₀ nM values by dividing the IC₅₀ nM of the positive controls for inhibition by the relative binding of the peptide of interest. This method of data compilation has proven to be the most accurate and consistent for comparing peptides that have been tested on different days, or with different lots of purified MHC.

[0604] Binding assays as outlined above may be used to analyze supermotif and/or motif-bearing epitopes as, for example, described in Example 2.

### Example 2

### Identification of HPV HLA Supermotif- and Motif-Bearing CTL Candidate Epitopes

[0605] Vaccine compositions of the invention can include multiple epitopes that comprise multiple HLA supermotifs or motifs to achieve broad population coverage. This example illustrates the identification of supermotif- and motif-bearing epitopes for the inclusion in such a vaccine composition. Calculation of population coverage was performed using the strategy described below.

[0606] Computer Searches and Algorithms for Identification of Supermotif and/or Motif-Bearing Epitopes

[0607] The searches performed to identify the motif-bearing peptide sequences in Examples 2 and 5 employed the protein sequence data from seven proteins (E1, E2, E5, E6, E7, L1 and L2) (see, Table 11, below) obtained from HPV types 6a, 6b, 11a, 16, 18, 31, 33, 45, 52, 56, and 58 (see, Table 12, below).

TABLE 11
Accession Nos. for Individual Proteins According to HPV Type

| | E1 | E2 | E4 | E5 | E5a | E5b | E6 | E7 | L1 | L2 |
|---|---|---|---|---|---|---|---|---|---|---|
| 6a | Q84293 | Q84294 | Q84295 | N/A | Q84296 | N/A | Q84291 | Q84929 | P03100 | Q84297 |
| | AAA74213 | AAA74214 | AAA74215 | | AAA74216 | | AAA74211 | AAA74212 | AAA74218 | |
| 6b | P03113 | P03119 | CAA25022 | N/A | P06460 | P06461 | P06462 | P06464 | P03100 | P03106 |
| | CAA25020 | CAA25021 | W4WL6 | | CAA25023 | CAA25024 | CAA25018 | CAA25019 | CAA25026 | CAA25025 |
| | W1WL6 | W2WL6 | | | W5WL6A | W5WLB | W6WL6 | W7WL6 | P1WL6 | P2WL6 |
| 11 | W1WL11 | AAA46930 | P04016 | N/A | W5WL11 | W5WL1B | W6WL11 | AAA46928 | P04012 | P2WL11 |
| | P04014 | W2WLI1 | W4WL11 | | P04017 | P04018 | P04019 | AAA21704 | P1WL11 | AAA46934 |
| | AAA46929 | P04015 | AAA46931 | | AAA46932 | AAA46933 | AAA21703 | W7WL11 | AAA4635 | P040I3 |
| | | | | | | | AAA46927 | P04020 | | |
| 16 | W1SLHS | W2WLHS | N/A | W5WLHS | N/A | N/A | W6WLHS | W7WLHS | AAD33259 | AAD33258 |
| 18 | W1WL18 | WL18 | N/A | W5WL18 | N/A | N/A | W6WL18 | PO6788 | CAA28671 | P2WL18 |
| 31 | W1WL31 | W2WL3 | N/A | W5WL31 | N/A | N/A | W6WL31 | W7WL31 | P1WL31 | P2WL31 |
| 33 | W1WL33 | W2WL33 | N/A | W5WL33 | N/A | N/A | W6WL33 | W7WL33 | P1WL33 | P2WL33 |
| 45 | S36563 | S36564 | N/A | N/A | N/A | N/A | CAB44706 | CAB44707 | CAB44705 | S36565 |
| 56 | N/A | S36581 | N/A | N/A | N/A | N/A | W6WL56 | S36580 | S38563 | S36582 |

[0608] TABLE 12
Accession Nos. for Entire HPV Sequence According to HPV Type

| HPV Type | Accession No. |
|---|---|
| 6a | X00203 |
| 6b | X00203 |
| 11a | M14119 |
| 16 | K02718 |
| 18 | X05015 |
| 31 | J04353 |
| 33 | M12732 |
| 45 | X74479 |
| 52 | X74481 |
| 56 | X74483 |
| 58 | D90400 |

[0609] Computer searches for epitopes bearing HLA Class I or Class II supermotifs or motifs were performed as follows. All translated HPV protein sequences were analyzed using a text string search software program, e.g., MotifSearch 1.4 (D. Brown, San Diego) to identify potential peptide sequences containing appropriate HLA binding motifs; alternative programs are readily produced in accordance with information in the art in view of the motif/supermotif disclosure herein. Furthermore, such calculations can be made mentally.

[0610] Identified HLA-A1, -A2, -A3, -A11, A24, -B7, -B44, and -DR supermotif sequences were scored using polynomial algorithms to predict their capacity to bind to specific HLA-Class I or Class II molecules. These polynomial algorithms take into account both extended and refined motifs (that is, to account for the impact of different amino acids at different positions), and are essentially based on the premise that the overall affinity (or ΔG) of peptide-HLA molecule interactions can be approximated as a linear polynomial function of the type:
“ΔG”=aₗᵢ×a₂ᵢ×a₃ᵢ . . . ×aₙᵢ

[0611] where aⱼᵢ is a coefficient which represents the effect of the presence of a given amino acid (i) at a given position (i) along the sequence of a peptide of n amino acids. The crucial assumption of this method is that the effects at each position are essentially independent of each other (i.e., independent binding of individual side-chains). When residue j occurs at position i in the peptide, it is assumed to contribute a constant amount jᵢ to the free energy of binding of the peptide irrespective of the sequence of the rest of the peptide. This assumption is justified by studies from our laboratories that demonstrated that peptides are bound to MHC and recognized by T cells in essentially an extended conformation.

[0612] The method of derivation of specific algorithm coefficients has been described in Gulukota, et al., J. Mol. Biol. 267:1258-67, 1997; (see also Sidney, J., et al., Human Immunol. 45:79-93, 1996; and Southwood, S., et al., J. Immunol. 160:3363-3373 (1998)). Briefly, for all i positions, anchor and non-anchor alike, the geometric mean of the average relative binding (ARB) of all peptides carrying j is calculated relative to the remainder of the group, and used as the estimate of jᵢ. For Class II peptides, if multiple alignments are possible, only the highest scoring alignment is utilized, following an iterative procedure. To calculate an algorithm score of a given peptide in a test set, the ARB values corresponding to the sequence of the peptide are multiplied. If this product exceeds a chosen threshold, the peptide is predicted to bind. Appropriate thresholds are chosen as a function of the degree of stringency of prediction desired.

[0613] Selection of HLA-A2 Supertype Cross-Reactive Peptides

[0614] Complete protein sequences from the seven HPV structural and regulatory proteins of the HPV strains listed above were aligned, then scanned, utilizing motif identification software, to identify 9- and 10-mer sequences containing the HLA-A2-supermotif main anchor specificity.

[0615] HLA-A2 supermotif-bearing sequences are shown in Tables 15 and 16. Typically, these sequences are then scored using the A2 algorithm and the peptides corresponding to the positive-scoring sequences are synthesized and tested for their capacity to bind purified HLA-A*0201 molecules in vitro (HLA-A*0201 is considered a prototype A2 supertype molecule).

[0616] Examples of peptides that bind to HLA-A*0201 with IC₅₀ values ≦500 nM are shown in Tables 15-16. Peptides that bind to at least three of the five A2-supertype alleles tested are typically deemed A2-supertype cross-reactive binders. Preferred peptides bind at an affinity equal to or less than 500 nM to three or more HLA-A2 supertype molecules.

[0617] Selection of HLA-A3 Supermotif-Bearing Epitopes

[0618] The HPV protein sequences scanned above were also examined for the presence of peptides with the HLA-A3-supermotif primary anchors. Peptides corresponding to the supermotif-bearing sequences are then synthesized and tested for binding to HLA-A*0301 and HLA-A*1101 molecules, the two most prevalent A3-supertype alleles. The peptides that are found to bind one of the two alleles with binding affinities of ≦500 nM, often ≦200 nM, are then tested for binding cross-reactivity to the other common A3-supertype alleles (e.g., A*3101, A*3301, and A*6801) to identify those that can bind at least three of the five HLA-A3-supertype molecules tested.

[0619] Selection of HLA-B7 Supermotif Bearing Epitopes

[0620] The same HPV target antigen protein sequences were also analyzed for the presence of 9- or 10-mer peptides with the HLA-B7-supermotif. Corresponding peptides are synthesized and tested for binding to HLA-B*0702, the most common B7-supertype allele (i.e., the prototype B7 supertype allele). Peptides binding B*0702 with IC₅₀ of ≦500 nM are identified using standard methods. These peptides are then tested for binding to other common B7-supertype molecules (e.g., B*3501, B*5101, B*5301, and B*5401). Peptides capable of binding to three or more of the five B7-supertype alleles tested are thereby identified.

[0621] Selection of A1 and A24 Motif-Bearing Epitopes

[0622] To further increase population coverage, HLA-A1 and -A24 epitopes can, for example, also be incorporated into potential vaccine constructs. An analysis of the protein sequence data from the HPV target antigens utilized above can also be performed to identify HLA-A1- and A24-motif-containing sequences.

[0623] High affinity and/or cross-reactive binding epitopes that bear other motif and/or supermotifs are identified using analogous methodology.

### Example 3

### Confirmation of Immunogenicity

[0624] Cross-reactive candidate CTL A2-supermotif-bearing peptides that are identified as described in Example 2 were selected for in vitro immunogenicity testing. Testing was performed using the following methodology.

Target Cell Lines for Cellular Screening:

[0625] The .221A2.1 cell line, produced by transferring the HLA-A2.1 gene into the HLA-A, -B, -C null mutant human B-lymphoblastoid cell line 721.221, is used as the peptide-loaded target to measure activity of HLA-A2.1-restricted CTL. This cell line is grown in RPMI-1640 medium supplemented with antibiotics, sodium pyruvate, nonessential amino acids and 10% (v/v) heat inactivated FCS. Cells that express an antigen of interest, or transfectants comprising the gene encoding the antigen of interest, can be used as target cells to test the ability of peptide-specific CTLs to recognize endogenous antigen.

Primary CTL Induction Cultures:

[0626] Generation of Dendritic Cells (DC): PBMCs are thawed in RPMI with 30 μg/ml DNAse, washed twice and resuspended in complete medium (RPMI-1640 plus 5% AB human serum, non-essential amino acids, sodium pyruvate, L-glutamine and penicillin/strpetomycin). The monocytes are purified by plating 10×10⁶ PBMC/well in a 6-well plate. After 2 hours at 37° C., the non-adherent cells are removed by gently shaking the plates and aspirating the supernatants. The wells are washed a total of three times with 3 ml RPMI to remove most of the non-adherent and loosely adherent cells. Three ml of complete medium containing 50 ng/ml of GM-CSF and 1,000 U/ml of IL-4 are then added to each well. TNFα is added to the DCs on day 6 at 75 ng/ml and the cells are used for CTL induction cultures on day 7.

[0627] Induction of CTL with DC and Peptide: CD8⁺ T-cells are isolated by positive selection with Dynal immunomagnetic beads (Dynabeads® M-450) and the detacha-bead® reagent. Typically about 200-250×10⁶ PBMC are processed to obtain 24×10⁶ CD8⁺ T-cells (enough for a 48-well plate culture). Briefly, the PBMCs are thawed in RPMI with 30 μg/ml DNAse, washed once with PBS containing 1% human AB serum and resuspended in PBS/1% AB serum at a concentration of 20×10⁶ cells/ml. The magnetic beads are washed 3 times with PBS/AB serum, added to the cells (140 μl beads/20×10⁶ cells) and incubated for 1 hour at 4° C. with continuous mixing. The beads and cells are washed 4× with PBS/AB serum to remove the non-adherent cells and resuspended at 100×10⁶ cells/ml (based on the original cell number) in PBS/AB serum containing 100 μl/ml detacha-bead® reagent and 30 kg/ml DNAse. The mixture is incubated for 1 hour at room temperature with continuous mixing. The beads are washed again with PBS/AB/DNAse to collect the CD8⁺ T-cells. The DC are collected and centrifuged at 1300 rpm for 5-7 minutes, washed once with PBS with 1% BSA, counted and pulsed with 40 μg/ml of peptide at a cell concentration of 1-2×10⁶/ml in the presence of 3 μg/ml β₂-microglobulin for 4 hours at 20° C. The DC are then irradiated (4,200 rads), washed 1 time with medium and counted again.

[0628] Setting up induction cultures: 0.25 ml cytokine-generated DC (at 1×10⁵ cells/ml) are co-cultured with 0.25 ml of CD8⁺ T-cells (at 2×10⁶ cell/ml) in each well of a 48-well plate in the presence of 10 ng/ml of IL-7. Recombinant human IL-10 is added the next day at a final concentration of 10 ng/ml and rhuman IL-2 is added 48 hours later at 10 IU/ml.

[0629] Restimulation of the induction cultures with peptide-pulsed adherent cells: Seven and fourteen days after the primary induction the cells are re-stimulated with peptide-pulsed adherent cells. The PBMCS are thawed and washed twice with RPMI and DNAse. The cells are resuspended at 5×10⁶ cells/ml and irradiated at approximately 4200 rads. The PBMCs are plated at 2×10⁶ in 0.5 ml complete medium per well and incubated for 2 hours at 37° C. The plates are washed twice with RPMI by tapping the plate gently to remove the non-adherent cells and the adherent cells pulsed with 10 μg/ml of peptide in the presence of 3 μg/ml 12 microglobulin in 0.25 ml RPMI/5% AB per well for 2 hours at 37° C. Peptide solution from each well is aspirated and the wells are washed once with RPMI. Most of the media is aspirated from the induction cultures (CD8⁺ cells) and brought to 0.5 ml with fresh media. The cells are then transferred to the wells containing the peptide-pulsed adherent cells. Twenty four hours later rhuman IL-10 is added at a final concentration of 10 ng/ml and rhuman IL-2 is added the next day and again 2-3 days later at 50 IU/ml (Tsai, et al., Crit. Rev. Immunol. 18(1-2):65-75, 1998). Seven days later the cultures are assayed for CTL activity in a ⁵¹Cr release assay. In some experiments the cultures are assayed for peptide-specific recognition in the in situ IFNγ ELISA at the time of the second restimulation followed by assay of endogenous recognition 7 days later. After expansion, activity is measured in both assays for a side by side comparison.

Measurement of CTL Lytic Activity by ⁵¹Cr Release:

[0630] Seven days after the second restimulation, cytotoxicity is determined in a standard (5 hr) ⁵¹Cr release assay by assaying individual wells at a single E:T. Peptide-pulsed targets are prepared by incubating the cells with 10 μg/ml peptide overnight at 37° C.

[0631] Adherent target cells are removed from culture flasks with trypsin-EDTA. Target cells are labeled with 200 μCi of ⁵¹Cr sodium chromate (Dupont, Wilmington, Del.) for 1 hour at 37° C. Labeled target cells are resuspended at 106 per ml and diluted 1:10 with K562 cells at a concentration of 3.3×10⁶/ml (an NK-sensitive erythroblastoma cell line used to reduce non-specific lysis). Target cells (100 μl) and 100 μl of effectors are plated in 96 well round-bottom plates and incubated for 5 hours at 37° C. At that time, 100 μl of supernatant are collected from each well and percent lysis is determined according to the formula: [(cpm of the test sample−cpm of the spontaneous ⁵¹Cr release sample)/(cpm of the maximal ⁵¹Cr release sample−cpm of the spontaneous ⁵¹Cr release sample)]×100. Maximum and spontaneous release are determined by incubating the labeled targets with 1% Triton X-100 and media alone, respectively. A positive culture is defined as one in which the specific lysis (sample-background) is 10% or higher in the case of individual wells and is 15% or more at the 2 highest E:T ratios when expanded cultures are assayed.

In Situ Measurement of Human IFNγ Production as an Indicator of Peptide-Specific and Endogenous Recognition:

[0632] Immulon 2 plates are coated with mouse anti-human IFNγ monoclonal antibody (4 μg/ml 0.1M NaHCO₃, pH8.2) overnight at 4° C. The plates are washed with Ca²⁺, Mg²⁺-free PBS/0.05% Tween 20 and blocked with PBS/10% FCS for 2 hours, after which the CTLs (100 μl/well) and targets (100 μl/well) are added to each well, leaving empty wells for the standards and blanks (which received media only). The target cells, either peptide-pulsed or endogenous targets, are used at a concentration of 1×10⁶ cells/ml. The plates are incubated for 48 hours at 37° C. with 5% CO₂.

[0633] Recombinant human IFNγ is added to the standard wells starting at 400 pg or 1200 pg/100 μl/well and the plate incubated for 2 hours at 37° C. The plates are washed and 100 μl of biotinylated mouse anti-human IFNγ monoclonal antibody (2 μg/ml in PBS/3% FCS/0.05% Tween 20) are added and incubated for 2 hours at room temperature. After washing again, 100 μl HRP-streptavidin (1:4000) are added and the plates incubated for 1 hour at room temperature. The plates are then washed 6 times with wash buffer, 100 μl/well developing solution (TMB 1:1) are added, and the plates allowed to develop for 5-15 minutes. The reaction is stopped with 50 μl/well 1M H₃PO₄ and read at OD₄₅₀. A culture is considered positive if it measured at least 50 pg of IFNγ/well above background and is twice the background level of expression.

[0634] Those cultures that demonstrate specific lytic activity against peptide-pulsed targets and/or tumor targets are expanded over a two week period with anti-CD3. Briefly, 5×10⁴ CD8⁺ cells are added to a T25 flask containing the following: 1×10⁶ irradiated (4,200 rad) PBMC (autologous or allogeneic) per ml, 2×10⁵ irradiated (8,000 rad) EBV-transformed cells per ml, and OKT3 (anti-CD3) at 30 ng per ml in RPMI-1640 containing 10% (v/v) human AB serum, non-essential amino acids, sodium pyruvate, 25 μM 2-mercaptoethanol, L-glutamine and penicillin/streptomycin. Rhuman IL2 is added 24 hours later at a final concentration of 200 IU/ml and every 3 days thereafter with fresh media at 50 IU/ml. The cells are split if the cell concentration exceeded 1×10⁶/ml and the cultures are assayed between days 13 and 15 at E:T ratios of 30, 10, 3 and 1:1 in the ⁵¹Cr release assay or at 1×10⁶/ml in the in situ IFNγ assay using the same targets as before the expansion.

[0635] Cultures are expanded in the absence of anti-CD3⁺ as follows. Those cultures that demonstrate specific lytic activity against peptide and endogenous targets are selected and 5×10⁴ CD8⁺ cells are added to a T25 flask containing the following: 1×10⁶ autologous PBMC per ml which have been peptide-pulsed with 10 μg/ml peptide for 2 hours at 37° C. and irradiated (4,200 rad); 2×10⁵ irradiated (8,000 rad) EBV-transformed cells per ml RPMI-1640 containing 10% (v/v) human AB serum, non-essential AA, sodium pyruvate, 25 mM 2-mercaptoethanol, L-glutamine and gentamicin.

Evaluation of Immunogenicity:

[0636] Immunogenicity of HLA-A1 Motif-Bearing Peptides

[0637] HLA-A1 motif cross-reactive binding peptides are tested in the cellular assay for the ability to induce peptide-specific CTL in normal individuals. In this analysis, a peptide is typically considered to be an epitope if it induces peptide-specific CTLs in at least 2 donors (unless otherwise noted) and preferably, also recognizes the endogenously expressed peptide. See, Table 31. The data presented in Table 31 summarize such an analysis of the recognition of HLA-A1-restricted peptides by PBL isolated from HLA-A1 positive individuals. In the Table, the sequence of each peptide analyzed is presented in the first column (labeled “Sequence”). The unique sequence identifier assigned to each peptide is presented in the second column (labeled “SEQ ID NO”). The viral type and antigenic origin of each peptide is provided in the third column (labeled “Source”). In this column, the viral type is provided as the first component of each entry and the antigenic origin is provided as the second component of each entry. The third component of each entry indicates the position within the antigen of the N-terminal amino acid residue of the peptide epitope. A fourth component is present for analog peptide epitopes. If present, this component of each entry indicates the position and substituted amino acid residue for each analog peptide epitope. The fourth and fifth columns are collectively labeled “+donors/total.” Column four provides the data for the peptide being examined. If the peptide is an analog, then column five provides the data for the corresponding wild type (i.e., naturally occurring or non-analoged) peptide. In each column, the number to the left of the slash represents the number of donors for which an immunogenic response was observed, while the number to the right of the slash represents the number of donors tested. The sixth and seventh columns are collectively labeled “Positive wells/total tested.” In each column, the number to the left of the slash represents the number of positive wells in the immunogenicity assay described above, while the number to the right of the slash represents total number of wells tested. The eighth and ninth columns are collectively labeled “Stimulation index.” In each column, the amount of IFNγ released in the positive well is compared to the amount released in a control well. In cases where multiple wells are positive, the mean value of the positive wells is calculated. The amount of IFNγ released in the positive well is expressed as the number of times over the background level of γ released (i.e., in the control well). Values of the actual peptides recited in the Table are provided in the column labeled “Peptide,” whereas values of the wild type peptides corresponding to analog peptides recited in the Table are provided in the column labeled “WT.” The tenth and eleventh columns are collectively labeled “Net IFNγ release (pg/well).” Values of IFNγ released in each positive well for each peptide recited in the Table are provided in the column labeled “Peptide.” In cases where multiple wells are positive, the mean value of the positive wells is calculated. Values of the actual peptides recited in the Table are provided in the column labeled “Peptide,” whereas values of the wild type peptides corresponding to analog peptides recited in the Table are provided in the column labeled “WT.”

[0638] Thus, for example, the first entry on Table 31 indicates that the peptide comprising the sequence ITDIILECVY (first column) (SEQ ID NO:______; second column): (third column) was obtained from the E6 protein of HPV-16 beginning at position 30; (third column) is an analog peptide with a threonine substitution at position 2; (fourth column) exhibited a positive immunogenic response in PBL isolated from 1 out of 5 HLA-A1 positive donors; (fifth column) whereas the wild type peptide corresponding to the peptide recited in the Table failed to exhibit a positive immunogenic response in PBL isolated from any of 5 HLA-A1 positive donors; (sixth column) exhibited a positive response in 1 out of 234 wells tested in the immunogenicity assay described above; (seventh column) whereas the corresponding wild type peptide exhibited a positive response in zero out of one wells tested; (eighth column) the amount of IFNγ detected was 8 times that detected in a control well; (ninth column) whereas the stimulation index of the corresponding wild type peptide was not tested; (tenth column) the positive well produced 103 pg of IFNγ; (eleventh column) whereas there was no IFNγ produced in the well of the corresponding wild type peptide.

[0639] Immunogenicity is additionally confirmed using PBMCs isolated from HPV-infected patients. Briefly, PBMCs are isolated from patients, re-stimulated with peptide-pulsed monocytes and assayed for the ability to recognize peptide-pulsed target cells as well as transfected cells endogenously expressing the antigen.

[0640] Immunogenicity of HLA-A2 Supermotif-Bearing Peptides

[0641] A2-supermotif cross-reactive binding peptides are tested in the cellular assay for the ability to induce peptide-specific CTL in normal individuals. In this analysis, a peptide is typically considered to be an epitope if it induces peptide-specific CTLs in at least 2 donors (unless otherwise noted) and preferably, also recognizes the endogenously expressed peptide.

[0642] Immunogenicity is additionally confirmed using PBMCs isolated from HPV-infected patients. Briefly, PBMCs are isolated from patients, re-stimulated with peptide-pulsed monocytes and assayed for the ability to recognize peptide-pulsed target cells as well as transfected cells endogenously expressing the antigen.

[0643] Immunogenicity of HLA-A*03/A11 Supermotif-Bearing Peptides

[0644] HLA-A3 supermotif-bearing cross-reactive binding peptides are also evaluated for immunogenicity using methodology analogous for that used to evaluate the immunogenicity of the HLA-A2 supermotif peptides. See, Table 32. The data presented in Table 32 summarize such an analysis of the recognition of HLA-A3-restricted peptides by PBL isolated from HLA-A3 positive individuals. The contents of each column are as described above for the HLA-A1 analysis, with the exception that, in Table 32, the first column (labeled “Epimmune ID”) refers to a peptide identification system utilized by the inventors.

[0645] Immunogenicity of HLA-A24 Supermotif-Bearing Peptides

[0646] HLA-A24 motif-bearing cross-reactive binding peptides are also evaluated for immunogenicity using methodology analogous for that used to evaluate the immunogenicity of the HLA-A24 motif peptides. See, Table 33. The data presented in Table 33 summarize such an analysis of the recognition of HLA-A24-restricted peptides by PBL isolated from HLA-A24 positive individuals. The contents of each column are as described above for the HLA-A24 analysis.

[0647] Immunogenicity of HLA-B7 Supermotif-Bearing Peptides

[0648] Immunogenicity screening of the B7-supertype cross-reactive binding peptides identified in Example 2 are evaluated in a manner analogous to the evaluation of HLA-A2- and A3-supermotif-bearing peptides.

### Example 4

### Implementation of the Extended Supermotif to Improve the Binding Capacity of Native Epitopes by Creating Analogs

[0649] HLA motifs and supermotifs (comprising primary and/or secondary residues) are useful in the identification and preparation of highly cross-reactive native peptides, as demonstrated herein. Moreover, the definition of HLA motifs and supermotifs also allows one to engineer highly cross-reactive epitopes by identifying residues within a native peptide sequence which can be analoged, or “fixed” to confer upon the peptide certain characteristics, e.g. greater cross-reactivity within the group of HLA molecules that comprise a supertype, and/or greater binding affinity for some or all of those HLA molecules. Examples of analoging peptides to exhibit modulated binding affinity are set forth in this example.

[0650] Analoging at Primary Anchor Residues

[0651] Peptide engineering strategies are implemented to further increase the cross-reactivity of the epitopes. For example, on the basis of the data disclosed, e.g., in related and co-pending U.S. patent application Ser. No. 09/226,775, the main anchors of A2-supermotif-bearing peptides are altered, for example, to introduce a preferred L, I, V, or M at position 2, and I or V at the C-terminus.

[0652] To analyze the cross-reactivity of the analog peptides, each engineered analog is initially tested for binding to the prototype A2 supertype allele A*0201, then, if A*0201 binding capacity is maintained, for A2-supertype cross-reactivity.

[0653] Alternatively, a peptide is tested for binding to one or all supertype members and then analoged to modulate binding affinity to any one (or more) of the supertype members to add population coverage.

[0654] The selection of analogs for immunogenicity in a cellular screening analysis is typically further restricted by the capacity of the parent peptide to bind at least weakly, i.e., bind at an IC₅₀ of 5000 nM or less, to three of more A2 supertype alleles. The rationale for this requirement is that the naturally-occurring peptides must be present endogenously in sufficient quantity to be biologically relevant. Analoged peptides have been shown to have increased immunogenicity and cross-reactivity by T cells specific for the parent epitope (see, e.g., Parkhurst, et al., J. Immunol. 157:2539, 1996; and Pogue, et al., Proc. Natl. Acad. Sci. U.S.A. 92:8166, 1995).

[0655] In the cellular screening of these peptide analogs, it is important to demonstrate that analog-specific CTLs are also able to recognize the wild-type peptide and, when possible, target cells that endogenously express the epitope.

[0656] Analoging of HLA-A3 and B7-Supermotif-Bearing Peptides

[0657] Analogs of HLA-A3 supermotif-bearing epitopes are generated using strategies similar to those employed in analoging HLA-A2 supermotif-bearing peptides. For example, peptides binding to 3/5 of the A3-supertype molecules are engineered at primary anchor residues to possess a preferred residue (V, S, M, or A) at position 2.

[0658] The analog peptides are then tested for the ability to bind A*03 and A*11 (prototype A3 supertype alleles). Those peptides that demonstrate ≦500 nM binding capacity are then tested for A3-supertype cross-reactivity.

[0659] Similarly to the A2- and A3-motif bearing peptides, peptides binding 3 or more B7-supertype alleles can be improved, where possible, to achieve increased cross-reactive binding. B7 supermotif-bearing peptides are, for example, engineered to possess a preferred residue (V, I, L, or F) at the C-terminal primary anchor position, as demonstrated by Sidney, J., et al. (J. Immunol. 157:3480-3490, 1996).

[0660] Analoging at primary anchor residues of other motif and/or supermotif-bearing epitopes is performed in a like manner.

[0661] The analog peptides are then be tested for immunogenicity, typically in a cellular screening assay. Again, it is generally important to demonstrate that analog-specific CTLs are also able to recognize the wild-type peptide and, when possible, targets that endogenously express the epitope.

[0662] Analoging at Secondary Anchor Residues

[0663] Moreover, HLA supermotifs are of value in engineering highly cross-reactive peptides and/or peptides that bind HLA molecules with increased affinity by identifying particular residues at secondary anchor positions that are associated with such properties. For example, the binding capacity of a B7 supermotif-bearing peptide with an F residue at postion 1 is analyzed. The peptide is then analoged to, for example, substitute L for F at position 1. The analoged peptide is evaluated for increased binding affinity/and or increased cross-reactivity. Such a procedure identifies analoged peptides with modulated binding affinity.

[0664] Engineered analogs with sufficiently improved binding capacity or cross-reactivity can also be tested for immunogenicity in HLA-B7-transgenic mice, following for example, IFA immunization or lipopeptide immunization. Analoged peptides are additionally tested for the ability to stimulate a recall response using PBMC from HPV-infected patients.

[0665] Other Analoging Strategies

[0666] Another form of peptide analoging, unrelated to the anchor positions, involves the substitution of a cysteine with α-amino butyric acid. Due to its chemical nature, cysteine has the propensity to form disulfide bridges and sufficiently alter the peptide structurally so as to reduce binding capacity. Substitution of α-amino-butyric acid for cysteine not only alleviates this problem, but has been shown to improve binding and crossbinding capabilities in some instances (see, e.g., the review by Sette, et al., In: Persistent Viral Infections, Eds. R. Ahmed and I. Chen, John Wiley & Sons, England, 1999).

[0667] Thus, by the use of even single amino acid substitutions, the binding affinity and/or cross-reactivity of peptide ligands for HLA supertype molecules can be modulated.

### Example 5

### Identification of HPV-Derived Sequences with HLA-DR Binding Motifs

[0668] Peptide epitopes bearing an HLA class II supermotif or motif are identified as outlined below using methodology similar to that described in Examples 1-3.

[0669] Selection of HLA-DR-Supermotif-Bearing Epitopes.

[0670] To identify HPV-derived, HLA class II HTL epitopes, the protein sequences from the same HPV antigens used for the identification of HLA Class I supermotif/motif sequences were analyzed for the presence of sequences bearing an HLA-DR-motif or supermotif. Specifically, 15-mer sequences were selected comprising a DR-supermotif, further comprising a 9-mer core, and three-residue N- and C-terminal flanking regions (15 amino acids total).

[0671] Protocols for predicting peptide binding to DR molecules have been developed (Southwood, et al. J. Immunology 160:3363-3373 (1998)). These protocols, specific for individual DR molecules, allow the scoring, and ranking, of 9-mer core regions. Each protocol not only scores peptide sequences for the presence of DR-supermotif primary anchors (i.e., at position 1 and position 6) within a 9-mer core, but additionally evaluates sequences for the presence of secondary anchors. Using allele specific selection tables (see, e.g., Southwood, et al. J. Immunology 160:3363-3373 (1998)), it has been found that the same protocols efficiently select peptide sequences with a high probability of binding a particular DR molecule. Additionally, it has been found that performing these protocols in tandem, specifically those for DR1, DR4w4, and DR7, can efficiently select DR cross-reactive peptides.

[0672] The HPV-derived peptides identified above are tested for their binding capacity for various common HLA-DR molecules. All peptides are initially tested for binding to the DR molecules in the primary panel: DR1, DR4w4, and DR7. Peptides binding at least 2 of these 3 DR molecules are then tested for binding to DR2w2 β1, DR2w2 β2, DR6w19, and DR9 molecules in secondary assays. Finally, peptides binding at least 2 of the 4 secondary panel DR molecules, and thus cumulatively at least 4 of 7 different DR molecules, are screened for binding to DR4w15, DR5w11, and DR8w2 molecules in tertiary assays. Peptides binding at least 7 of the 10 DR molecules comprising the primary, secondary, and tertiary screening assays are considered cross-reactive DR binders. HPV-derived peptides found to bind common HLA-DR alleles are of particular interest.

Selection of DR3 Motif Peptides

[0673] Because HLA-DR3 is an allele that is prevalent in Caucasian, Black, and Hispanic populations, DR3 binding capacity is an important criterion in the selection of HTL epitopes. However, data generated previously indicated that DR3 only rarely cross-reacts with other DR alleles (Sidney, J., et al., J. Immunol. 149:2634-2640, 1992; Geluk, et al., J. Immunol. 152:5742-48, 1994; Southwood, et al. J. Immunology 160:3363-3373 (1998)). This is not entirely surprising in that the DR3 peptide-binding motif appears to be distinct from the specificity of most other DR alleles. For maximum efficiency in developing vaccine candidates it would be desirable for DR3 motifs to be clustered in proximity with DR supermotif regions. Thus, peptides shown to be candidates may also be assayed for their DR3 binding capacity. However, in view of the distinct binding specificity of the DR3 motif, peptides binding only to DR3 can also be considered as candidates for inclusion in a vaccine formulation.

[0674] To efficiently identify peptides that bind DR3, target HPV antigens are analyzed for sequences carrying one of the two DR3 specific binding motifs reported by Geluk, et al. (J. Immunol. 152:5742-48, 1994). The corresponding peptides are then synthesized and tested for the ability to bind DR3 with an affinity of 1 μM or better, i.e., less than 1 μM. Peptides are found that meet this binding criterion and qualify as HLA class II high affinity binders.

[0675] DR3 binding epitopes identified in this manner are included in vaccine compositions with DR supermotif-bearing peptide epitopes.

[0676] Similarly to the case of HLA class I motif-bearing peptides, the class II motif-bearing peptides are analoged to improve affinity or cross-reactivity. For example, aspartic acid at position 4 of the 9-mer core sequence is an optimal residue for DR3 binding, and substitution for that residue often improves DR 3 binding.

### Example 6

### Immunogenicity of HPV-Derived HTL Epitopes

[0677] This example determines immunogenic DR supermotif- and DR3 motif-bearing epitopes among those identified using the methodology in Example 5.

[0678] Immunogenicity of HTL epitopes are evaluated in a manner analogous to the determination of immunogenicity of CTL epitopes by assessing the ability to stimulate HTL responses and/or by using appropriate transgenic mouse models. Immunogenicity is determined by screening for: 1.) in vitro primary induction using normal PBMC or 2.) recall responses from human PBMCs.

### Example 7

### Calculation of Phenotypic Frequencies of HLA-Supertypes in Various Ethnic Backgrounds to Determine Breadth of Population Coverage

[0679] This example illustrates the assessment of the breadth of population coverage of a vaccine composition comprised of multiple epitopes comprising multiple supermotifs and/or motifs.

[0680] In order to analyze population coverage, gene frequencies of HLA alleles were determined. Gene frequencies for each HLA allele were calculated from antigen or allele frequencies utilizing the binomial distribution formulae gf=1−(SQRT(1−af)) (see, e.g., Sidney, J., et al., Human Immunol. 45:79-93, 1996). To obtain overall phenotypic frequencies, cumulative gene frequencies were calculated, and the cumulative antigen frequencies derived by the use of the inverse formula [af=1−(1−Cgf)²].

[0681] Where frequency data was not available at the level of DNA typing, correspondence to the serologically defined antigen frequencies was assumed. To obtain total potential supertype population coverage no linkage disequilibrium was assumed, and only alleles confirmed to belong to each of the supertypes were included (minimal estimates). Estimates of total potential coverage achieved by inter-loci combinations were made by adding to the A coverage the proportion of the non-A covered population that could be expected to be covered by the B alleles considered (e.g., total=A+B*(1−A)). Confirmed members of the A3-like supertype are A3, A11, A31, A*3301, and A*6801. Although the A3-like supertype may also include A34, A66, and A*7401, these alleles were not included in overall frequency calculations. Likewise, confirmed members of the A2-like supertype family are A*0201, A*0202, A*0203, A*0204, A*0205, A*0206, A*0207, A*6802, and A*6901. Finally, the B7-like supertype-confirmed alleles are: B7, B*3501-03, B51, B*5301, B*5401, B*5501-2, B*5601, B*6701, and B*7801 (potentially also B*1401, B*3504-06, B*4201, and B*5602).

[0682] Population coverage achieved by combining the A2-, A3- and B7-supertypes is approximately 86% in five major ethnic groups, supra. Coverage may be extended by including peptides bearing the A1 and A24 motifs. On average, A1 is present in 12% and A24 in 29% of the population across five different major ethnic groups (Caucasian, North American Black, Chinese, Japanese, and Hispanic). Together, these alleles are represented with an average frequency of 39% in these same ethnic populations. The total coverage across the major ethnicities when A1 and A24 are combined with the coverage of the A2-, A3- and B7-supertype alleles is >95%. An analogous approach can be used to estimate population coverage achieved with combinations of class II motif-bearing epitopes.

[0683] Immunogenicity studies in humans (e.g., Bertoni, et al., J. Clin. Invest. 100:503, 1997; Doolan, et al., Immunity 7:97, 1997; and Threlkeld, et al., J. Immunol. 159:1648, 1997) have shown that highly cross-reactive binding peptides are almost always recognized as epitopes. The use of highly cross-reactive binding peptides is an important selection criterion in identifying candidate epitopes for inclusion in a vaccine that is immunogenic in a diverse population.

[0684] With a sufficient number of epitopes (as disclosed herein and from the art), an average population coverage is predicted to be greater than 95% in each of five major ethnic populations. The game theory Monte Carlo simulation analysis, which is known in the art (see, e.g., Osborne, M. J. and Rubinstein, A., A course in game theory, MIT Press, 1994), can be used to estimate what percentage of the individuals in a population comprised of the Caucasian, North American Black, Japanese, Chinese, and Hispanic ethnic groups would recognize the vaccine epitopes described herein. A preferred percentage is 90%. A more preferred percentage is 90%, 91%, 92%, 93%, 94%, 95%, 96%, 97%, 98%, 99% or 100%.

### Example 8

### CTL Recognition of Endogenous Processed Antigens after Priming

[0685] This example determines that CTL induced by native or analoged peptide epitopes identified and selected as described in Examples 1-5 recognize endogenously synthesized, i.e., native antigens.

[0686] Effector cells isolated from transgenic mice that are immunized with peptide epitopes as in Example 3, for example HLA-A2 supermotif-bearing epitopes, are re-stimulated in vitro using peptide-coated stimulator cells. Six days later, effector cells are assayed for cytotoxicity and the cell lines that contain peptide-specific cytotoxic activity are further re-stimulated. An additional six days later, these cell lines are tested for cytotoxic activity on ⁵¹Cr labeled Jurkat-A2.1/K^{b} target cells in the absence or presence of peptide, and also tested on ⁵¹Cr labeled target cells bearing the endogenously synthesized antigen, i.e. cells that are stably transfected with HPV expression vectors.

[0687] Alternatively, appropriate processing and presentation of epitopes derived from either the full-length HPV genes may be demonstrated using an in vitro assay. Jurkat cells expressing the HLA-A*0201 are transfected by lipofection with a construct encoding the HPV gene of interest. The coding regions may be subcloned into the replicating pCEI episomal vector. For transfection, 200 μl of cells are incubated for 4 hours at 37 degrees C. with a mixture of 4 μg of DNA and 6 μg of DMRIE-C (Invitrogen, Carlsbad, Calif.). Lipofected cells are then grown in RPMI-1640 containing 15% FBS, 1 μg/ml PHA, and 50 ng/ml PMA. Transient transfectants are assayed 24 to 48 hours after transfection.

[0688] High-affinity peptide epitope-specific CTL lines are generated from splenocytes of HLA-A*0201/K^{b} or HLA-A*1101/K^{b} transgenic mice previously immunized with peptide epitopes or DNA encoding them. Splenocytes are stimulated in vitro with 0.1 μg/ml peptide using LPS blasts as feeders and antigen-presenting cells (APC). Ten days after the initial stimulation, and weekly thereafter, cells are restimulated with LPS blasts pulsed for 1 hour with 0.1 μg/ml peptide. CTL lines are then used in assays 5 days following restimulation.

[0689] Epitope peptide-pulsed Jurkat target cells are used to establish the activity of CTL lines. Set numbers of CTLs (1-4×10⁵) are incubated with 10⁵ Jurkat cells pulsed with decreasing concentrations of peptide, 1-10 μg/ml. The amount of IFN-γ generated by the CTL lines upon recognition of the target cells pulsed with peptide is measured using the in situ ELISA and, when needed, to establish a standard curve. The same CTL lines are used to demonstrate processing and presentation of selected epitopes by the transfected cells.

[0690] The results of either approach will demonstrate that CTL lines obtained from animals primed with peptide epitope recognize endogenously synthesized HPV antigen. The choice of transgenic mouse model to be used for such an analysis depends upon the epitope(s) that is being evaluated. In addition to HLA-A*0201/Kb transgenic mice, several other transgenic mouse models including mice with human A11, which may also be used to evaluate A3 epitopes, and B7 alleles have been characterized and others (e.g., transgenic mice for HLA-A1 and A24) are being developed. HLA-DR1 and HLA-DR3 mouse models have also been developed, which may be used to evaluate HTL epitopes.

### Example 9

### Activity of CTL-HTL Conjugated Epitopes in Transgenic Mice

[0691] This example illustrates the induction of CTLs and HTLs in transgenic mice by use of an HPV antigen CTL/HTL peptide conjugate whereby the vaccine composition comprises peptides to be administered to an HPV-infected patient. The peptide composition can comprise multiple CTL and/or HTL epitopes and further, can comprise epitopes selected from multiple HPV target antigens. The epitopes are identified using methodology as described in Examples 1-5. The analysis demonstrates the enhanced immunogenicity that can be achieved by inclusion of one or more HTL epitopes in a vaccine composition. Such a peptide composition can comprise an HTL epitope conjugated to a preferred CTL epitope containing, for example, at least one CTL epitope that binds to multiple HLA family members at an affinity of 500 nM or less, or analogs of that epitope. The peptides may be lipidated, if desired.

[0692] Immunization procedures: Immunization of transgenic mice is performed as described (Alexander, et al., J. Immunol. 159:4753-4761, 1997). For example, A2/K^{b} mice, which are transgenic for the human HLA A2.1 allele and are useful for the assessment of the immunogenicity of HLA-A*0201 motif- or HLA-A2 supermotif-bearing epitopes, are primed subcutaneously (base of the tail) with a 0.1 ml of peptide in Incomplete Freund's Adjuvant, or if the peptide composition is a lipidated CTL/HTL conjugate, in DMSO/saline or if the peptide composition is a polypeptide, in PBS or Incomplete Freund's Adjuvant. Seven days after priming, splenocytes obtained from these animals are re-stimulated with syngenic irradiated LPS-activated lymphoblasts coated with peptide.

[0693] Cell lines: Target cells for peptide-specific cytotoxicity assays are Jurkat cells transfected with the HLA-A2.1/K^{b} chimeric gene (e.g., Vitiello, et al., J. Exp. Med. 173:1007, 1991)

[0694] In vitro CTL activation: One week after priming, spleen cells (30×10⁶ cells/flask) are co-cultured at 37° C. with syngeneic, irradiated (3000 rads), peptide coated lymphoblasts (10×10⁶ cells/flask) in 10 ml of culture medium/T25 flask. After six days, effector cells are harvested and assayed for cytotoxic activity.

[0695] Assays for Cytotoxic Activity:

[0696] Assay 1: Target cells (1.0 to 1.5×10⁶) are incubated at 37° C. in the presence of 200 μl of ⁵¹Cr. After 60 minutes, cells are washed three times and re-suspended in R10 medium. Peptide is added where required at a concentration of 1 μg/ml. For the assay, 10^{4 51}Cr-labeled target cells are added to different concentrations of effector cells (final volume of 200 μl) in U-bottom 96-well plates. After a 6 hour incubation period at 37° C., a 0.1 ml aliquot of supernatant is removed from each well and radioactivity is determined in a Micromedic automatic gamma counter. The percent specific lysis is determined by the formula: percent specific release=100×(experimental release−spontaneous release)/(maximum release−spontaneous release). To facilitate comparison between separate CTL assays run under the same conditions, % ⁵¹Cr release data is expressed as lytic units/10⁶ cells. One lytic unit is arbitrarily defined as the number of effector cells required to achieve 30% lysis of 10,000 target cells in a 6 hour ⁵¹Cr release assay. To obtain specific lytic units/10⁶, the lytic units/10⁶ obtained in the absence of peptide is subtracted from the lytic units/10⁶ obtained in the presence of peptide. For example, if 30% ⁵¹Cr release is obtained at the effector (E): target (T) ratio of 50:1 (i.e., 5×10⁵ effector cells for 10,000 targets) in the absence of peptide and 5:1 (i.e., 5×10⁴ effector cells for 10,000 targets) in the presence of peptide, the specific lytic units would be: [( 1/50,000)-( 1/500,000)]×10⁶⁼¹⁸ LU.

[0697] Assay 2: One to three days prior to the assay, 96-well ELISA plates (Costar, Corning, N.Y.) are coated with 50 μl per well of rat monoclonal antibody specific for murine IFN-γ (Clone RA-6A2, BD Biosciences/Pharmingen, San Diego, Calif.) at a concentration of 4 μg/ml in coating buffer (100 mM NaHCO₃, pH 8.2). The plates are then stored at 4-10 degrees C. until the day of the assay.

[0698] On the day of the assay, the plates are washed and blocked for 2 hours with 10% FBS in PBS. Cells from each 25 cm² flask are treated as an independent group. Duplicate wells of serially diluted splenocytes are cultured for 20 hours with and without peptide (1 μg/ml) and 10⁵ Jurkat A2.1/K^{b} cells per well at 37 degrees C. in 5% CO₂. The following day, the cells are removed by washing the plates with PBS and Tween 20 and the amount of IFN-γ that was secreted and captured by the bound Clone RA-6A2 monoclonal antibody is measured using a sandwich format ELISA. In this assay, a biotinylated rat monoclonal antibody specific for murine IFN-γ (Clone XMG1.2, BD Biosciences/Pharmingen) is used to detect the secreted IFN-γ. Horseradish peroxidase-coupled streptavidin (Zymed, South San Francisco, Calif.) and 3,3′,5,5′ tetramethylbenzidine and H₂O₂ (IMMUNOPURE® TMB Substrate Kit, Pierce, Rockford, Ill.) are used according to the manufacturer's directions for color development. The absorbance is read at 450 nm on a Labsystems Multiskan RC ELISA plate reader (Helsinki, Finland).

[0699] In situ IFN-γ ELISA data is then converted to secretory units (“SU”) for evaluation. The SU calculation is based on the number of cells that secrete 100 pg of IFN-γ in response to a particular peptide, corrected for the background amount of IFN-γ produced in the absence of peptide. To calculate the number of cells that secrete 100 pg of IFN-γ per well, a graph of the effector cell number (X axis) versus the pg/well of IFN-γ secreted (Y axis) is plotted. The slope (m) and y intercept (b) are calculated using the formula [(100−b)/m]. Because the number of cells needed to secrete 100 pg of IFN-γ in response to peptide will be lower than the cell number required for 100 pg of spontaneous release, the reciprocal values are calculated. The value obtained for the spontaneous release is then subtracted from the value obtained for specific peptide stimulation [(i/peptide stimulation)−(1/spontaneous release)]. The resulting number is multiplied by a constant of 10⁶, and this final number is designated the SU.

[0700] Results from the analysis of a subset of HLA-A2 and HLA-A3 supertype peptides obtained from Tables 16 and 18 are shown in Tables 29 and 30, respectively. In the Table, the sequence of each peptide is provided in the column labeled “Sequence.” The viral type and antigenic origin of each peptide is provided in the column labeled “Source.” In this column, the viral type is provided as the first component of each entry and the antigenic origin is provided as the second component of each entry. The third component of each entry indicates the position within the antigen of the N-terminal amino acid residue of the peptide epitope. A fourth component is present for analog peptide epitopes. If present, this component of each entry indicates the position and substituted amino acid residue for each analog peptide epitope. The final column of the Table provides a measurement of immunogenicity in secretory units (“SU;” as described above). The final column provides the SEQ ID NO for the peptide epitope. Thus, for example, the first entry on Table 29 indicates that the peptide comprising the sequence KLPQLCTEV (SEQ ID NO:______): (a) was obtained from the E6 protein of HPV-16 beginning at position 18; (b) is an analog peptide with a valine substitution at position 9; and (c) has an immunogenicity of 0.0 SU in the assay.

[0701] In situ ELISA assays for human cells are performed using a similar protocol, using mouse anti-human IFN-γ monoclonal antibody (Clone NIB42; BD Biosciences/Pharmingen) for coating, recombinant human IFN-γ (BD Biosciences/Pharmingen) for standards, and biotinylated mouse anti-human IFN-γ (Clone 4S.B3, BD Biosciences/Pharmingen) for detection. The plates are incubated for 48 hours with standards added after 24 hours. A culture was considered positive if it measured at least 50 pg of IFN-γ per well above background and is twice the background level of expression.

[0702] The results of either assay are analyzed to assess the magnitude of the CTL responses of animals injected with the immunogenic CTL/HTL conjugate vaccine preparation and are compared to the magnitude of the CTL response achieved using the CTL epitope as outlined in Example 3. Analyses similar to this may be performed to evaluate the immunogenicity of peptide conjugates containing multiple CTL epitopes and/or multiple HTL epitopes. In accordance with these procedures it is found that a CTL response is induced, and concomitantly that an HTL response is induced upon administration of such compositions.

[0703] Results from experiments described in this Example are shown in FIGS. 11a, 11b, 12a, 12b, 14a, 14b, 16a, 16b, 18a, 18b, 20a and 20b.

### Example 10

### Analysis of Cross-Type Immunogenicity of HPV Peptides

[0704] This example illustrates the procedure for the analysis of peptide epitope immunogenicity across HPV types. Peptide epitope candidates are selected for analysis on the basis of immunogenicity (see e.g., Example 3) and sequence conservation across multiple HPV types (as discussed above in the specification). In the present example, peptide epitope candidates are analyzed for immunogenicity across HPV Types 16, 18, 31, 33, 45, 52, 56, and 58 are analyzed, but in practice, these types and/or any other HPV Types may be analyzed in the same manner. Although in the present study, peptide epitope candidates comprise both naturally occurring HPV amino acid sequences and analog sequences, this example may be exploited for either naturally occurring peptide epitope candidates (i.e., “wild type” peptide epitopes) or analog sequences alone.

[0705] A set of peptide epitope candidates is selected on the basis of immunogenicity as described above in Example 3. Each of the peptide epitope candidates is then analyzed according to sequence alignments of selected HPV proteins (e.g., alignments of the HPV E1, E2, E6, and E7 protein sequences of HPV Types 16, 18, 31, 33, 45, 52, 56, and 58 are provided in Tables 25, 26, 27, and 28, respectively) to determine the level of conservation of each peptide epitope candidate across multiple HPV Types.

[0706] Peptide epitope candidates that are conserved across multiple HPV types are selected for analysis of immunogenicity across each of the HPV types considered in this example. Each conserved peptide epitope candidate is then analyzed according to the transgenic mouse immunogenicity analysis provided hereinabove in Example 9. Briefly, each conserved peptide epitope candidate is synthesized and used to inoculate the appropriate strain of HLA transgenic mouse. Splenocytes are then isolated and re-stimulated for one week with the conserved peptide epitope candidate. The cultures are then tested with the corresponding peptide epitope from each HPV type tested.

[0707] Results of this analysis are provided in Tables 34 (HLA-A2-restricted peptide epitope candidates), 35 (HLA-A11-restricted peptide epitope candidates), and 48 (HLA-A2-restricted and HLA-A3-restricted peptide epitope candidates). In each Table, the amino acid sequence of each peptide epitope candidate considered is provided in the first column (labeled “Sequence”). The individual sequence identifier is provided in the second column (labeled “SEQ ID NO”). The HPV type and antigenic source are provided in the third column (labeled “Source”). The fourth through the eleventh columns are collectively labeled “Immunogenicity (cross-reactivity on HPV Strain)” and provide a measure of the immunogenicity (in secretory units) of each peptide epitope candidate as measured against the corresponding peptide epitope in each of HPV Types 16, 18, 31, 33, 45, 52, 56, and 58.

[0708] Thus, for example, the first entry on Table 34 provides the data for the peptide epitope candidate TIHDIILECV (first column) (SEQ ID NO:______; second column). The immunogenicity of this peptide epitope candidate as challenged by the corresponding peptide epitope synthesized according to the naturally occurring amino acid sequence of HPV Types 16 (fourth column), 18 (fifth column), 31 (sixth column), 33 (seventh column), 45 (eighth column), 52 (ninth column), 56 (tenth column), and 58 (eleventh column) is provided.

### Example 11

### Selection of CTL and HTL Epitopes for Inclusion in an HPV-Specific Vaccine

[0709] This example illustrates the procedure for the selection of peptide epitopes for vaccine compositions of the invention. The peptides in the composition can be in the form of a polynucleotide sequence, either single or one or more sequences (i.e., minigene) that encodes peptide(s), or can be single and/or polyepitopic peptides.

[0710] The following principles are utilized when selecting an array of epitopes for inclusion in a vaccine composition. Each of the following principles is balanced in order to make the selection.

[0711] Epitopes are selected which, upon administration, mimic immune responses that have been observed to be correlated with HPV clearance. The number of epitopes used depends on observations of patients who spontaneously clear HPV. For example, if it has been observed that patients who spontaneously clear HPV generate an immune response to at least 3 epitopes on at least one HPV antigen, then 3-4 epitopes should be included for HLA class I. A similar rationale is used to determine HLA class II epitopes.

[0712] When selecting an array of HPV epitopes, it is preferred that at least some of the epitopes are derived from early proteins. The early proteins of HPV are expressed when the virus is replicating, either following acute or dormant infection. Therefore, it is particularly preferred to use epitopes from early stage proteins to alleviate disease manifestations at the earliest stage possible.

[0713] Epitopes are often selected that have a binding affinity of an IC₅₀ of 500 nM or less for an HLA class I molecule, or for class II, an IC₅₀ of 1000 nM or less. See e.g., Tables 36A-B, 37A-B, and 48. Tables 36A-B, 37A-B, and 48 provide binding and immunogenicity data for peptide selections chosen to comprise first and second generation HPV vaccines, respectively. Each Table provides data for peptides analyzed to generate a 6 strain HPV vaccine (Tables 36A, 37A, and 48) and a 4 strain HPV vaccine (Tables 36B and 37B). Within each Table, data are provided for HLA-A2, -A3, -A1, and -A24 peptides.

[0714] With respect to Tables 36A, 37A, and 48: For the HLA-A2 peptides, data are provided to illustrate: (a) the binding affinity to purified HLA molecules and (b) the cross-strain immunogenicity of each peptide. These experiments were done as described herein. For the HLA-A3 peptides, data are provided to illustrate: (a) the binding affinity to purified HLA molecules, (b) the cross-strain immunogenicity of each peptide, and, in some cases, (c) the recognition of HLA-A3-restricted peptides by PBL from HLA-A3 positive donors. These experiments were done as described herein. For the HLA-A1 and -A24 peptides, data are provided to illustrate: (a) the binding affinity to purified HLA molecules and (b) the recognition of HLA-A1- and HLA-A24-restricted peptides by PBL from HLA-A1- and HLA-A24 positive donors, respectively. These experiments were done as described herein.

[0715] With respect to Tables 36B and 37B: For HLA-A2 and -A3 peptides, data are provided to illustrate: (a) the binding affinity to purified HLA molecules and (b) the cross-strain immunogenicity of each peptide. The first entry for HLA-A3 on Table 37B also provides data for the recognition of HLA-A3-restricted peptides by PBL from HLA-A3 positive donors. These experiments were done as described herein. For the HLA-A1 and -A24 peptides, data are provided to illustrate: (a) the binding affinity to purified HLA molecules and (b) the recognition of HLA-A1- and HLA-A24-restricted peptides by PBL from HLA-A1- and HLA-A24 positive donors, respectively. These experiments were done as described herein.

[0716] Sufficient supermotif bearing peptides, or a sufficient array of allele-specific motif bearing peptides, are selected to give broad population coverage. For example, epitopes are selected to provide at least 80% population coverage. A Monte Carlo analysis, a statistical evaluation known in the art, can be employed to assess breadth, or redundancy, of population coverage.

[0717] When creating polyepitopic compositions, e.g. a minigene, it is typically desirable to generate the smallest peptide possible that encompasses the epitopes of interest. The principles employed are similar, if not the same, as those employed when selecting a peptide comprising nested epitopes.

[0718] In cases where the sequences of multiple variants of the same target protein are available, potential peptide epitopes can also be selected on the basis of their conservancy. For example, a criterion for conservancy may define that the entire sequence of an HLA class I binding peptide or the entire 9-mer core of a class II binding peptide be conserved in a designated percentage of the sequences evaluated for a specific protein antigen.

[0719] A vaccine composition comprised of selected peptides, when administered, is safe, efficacious, and elicits an immune response similar in magnitude to an immune response that controls or clears an acute HPV infection.

### Example 12

### Construction of Minigene Multi-Epitope DNA Plasmids

[0720] This example provides general guidance for the construction of a minigene expression plasmid. Minigene plasmids may, of course, contain various configurations of CTL and/or HTL epitopes or epitope analogs as described herein. Examples of the construction and evaluation of expression plasmids are described, for example, in U.S. Pat. No. 6,534,482.

[0721] A minigene expression plasmid typically includes multiple CTL and HTL peptide epitopes. In the present example, HLA-A2, -A3, -A1 and -A24 supermotif-bearing peptide epitopes are used in conjunction with DR supermotif-bearing epitopes and/or DR3 epitopes. HLA class I supermotif or motif-bearing peptide epitopes derived from multiple HPV antigens, preferably including both early and late phase antigens, are selected such that multiple supermotifs/motifs are represented to ensure broad population coverage. Similarly, HLA class II epitopes are selected from multiple HPV antigens to provide broad population coverage, i.e. both HLA DR-1-4-7 supermotif-bearing epitopes and HLA DR-3 motif-bearing epitopes are selected for inclusion in the minigene construct. The selected CTL and HTL epitopes are then incorporated into a minigene for expression in an expression vector.

[0722] Such a construct may additionally include sequences that direct the HTL epitopes to the endocytic compartment. For example, the Ii protein may be fused to one or more HTL epitopes as described in U.S. Pat. No. 6,534,482, wherein the CLIP sequence of the Ii protein is removed and replaced with an HLA class II epitope sequence so that HLA class II epitope is directed to the endocytic compartment, where the epitope binds to an HLA class II molecules.

[0723] This example illustrates the methods to be used for construction of a minigene-bearing expression plasmid. Other expression vectors that may be used for minigene compositions are available and known to those of skill in the art.

[0724] The minigene DNA plasmid of this example contains a consensus Kozak sequence and a consensus murine kappa Ig-light chain signal sequence followed by CTL and/or HTL epitopes selected in accordance with principles disclosed herein. Overlapping oligonucleotides that can, for example, average about 70 nucleotides in length with 15 nucleotide overlaps, are synthesized and HPLC-purified. The oligonucleotides encode the selected peptide epitopes as well as appropriate linker nucleotides, Kozak sequence, and signal sequence. The final multiepitope minigene is assembled by extending the overlapping oligonucleotides in three sets of reactions using PCR. A Perkin/Elmer 2400 PCR machine is used and a total of 30 cycles are performed using the following conditions: 95° C. for 15 sec, annealing temperature (5° below the lowest calculated Tm of each primer pair) for 30 sec, and 72° C. for 1 min.

[0725] For example, a minigene can be prepared as follows. For a first PCR reaction, 5 μg of each of two oligonucleotides are annealed and extended: In an example using eight oligonucleotides, i.e., four pairs of primers, oligonucleotides 1+2, 3+4, 5+6, and 7+8 are combined in 100 μl reactions containing Pfu polymerase buffer (1×=10 mM KCL, 10 mM (NH4)₂SO₄, 20 mM Tris-chloride, pH 8.75, 2 mM MgSO₄, 0.1% Triton X-100, 100 μg/ml BSA), 0.25 mM each dNTP, and 2.5 U of Pfu polymerase. The full-length dimer products are gel-purified, and two reactions containing the product of 1+2 and 3+4, and the product of 5+6 and 7+8 are mixed, annealed, and extended for 10 cycles. Half of the two reactions are then mixed, and 5 cycles of annealing and extension carried out before flanking primers are added to amplify the full length product. The full-length product is gel-purified and cloned into pCR-blunt (Invitrogen) and individual clones are screened by sequencing.

[0726] This method has been used to generate several HPV minigene vaccine constructs. For example, a subset of the peptides shown in Tables 13-24 were analyzed according to the methods described herein (e.g., section IV.L. of the specification) to determine the optimal arrangement of the epitopes in the minigenes disclosed herein. The peptides were then linked together using the method described in this Example to create numerous HPV minigene vaccine constructs. See e.g., Tables 38A-B, 41, 46-47, 52, 58, 63, and 66. In addition, the peptides were also analyzed according to the methods described herein (e.g., section IV.L. of the specification) to determine the optimal arrangement of the epitopes in the minigenes disclosed herein. The peptides were then also linked together using the method described in this Example to create two additional HPV minigene vaccine constructs. See e.g., Table 38C-D. The polynucleotide and amino acid sequences encoding these constructs are provided in Tables 39A-D, 40A-D, 42-45, 49-50, 53-54, 59, 60-62, 64-65, and 67-68.

[0727] Following additional analyses of the immunogenicity of the individual peptides included in the minigenes shown in Tables 38A-D, several of the peptide epitopes were replaced with other peptide epitopes of the invention that exhibited superior immunogenicity characteristics. In addition, the order and spacer characteristics of the revised minigenes were reanalyzed according to the methods described herein, e.g., in section IV.L. of the specification. The resulting minigenes are designated “second generation” and are provided in Tables 41A-D. The polynucleotide and amino acid sequences encoding these constructs are provided in Tables 42A-D and 43A-D.

[0728] Following additional analyses of the immunogenicity of the individual peptides included in the “first” and “second” generation minigenes described herein, several of the peptide epitopes were replaced with other peptide epitopes of the invention that exhibited superior immunogenicity characteristics. Alternatively, or in addition to, several of the peptide epitopes were modified so as to exhibit superior immunogenicity characteristics. Alternatively, or in addition to, additional peptide epitopes of the invention that exhibited superior immunogenicity characteristics were added to existing minigenes of the invention. The order and spacer characteristics of the revised minigenes were then reanalyzed according to the methods described herein, e.g., in section IV.L. of the specification. The resulting minigenes are designated “third” generation minigenes. Schematic diagrams, nucleotide and amino acid sequences, and data are provided and described in Tables 44-68. nucleotide and amino acid sequences, and data are provided and described in Tables 44-85.

### Example 13

### The Plasmid Construct and the Degree to which it Induces Immunogenicity

[0729] The degree to which a plasmid construct, for example a plasmid constructed in accordance with Example 11, is able to induce immunogenicity can be evaluated in vitro by testing for epitope presentation by APC following transduction or transfection of the APC with an epitope-expressing nucleic-acid construct. Such a study determines “antigenicity” and allows the use of human APC. The assay determines the ability of the epitope to be presented by the APC in a context that is recognized by a T cell by quantifying the density of epitope-HLA class I complexes on the cell surface. Quantitation can be performed by directly measuring the amount of peptide eluted from the APC (see, e.g., Sijts, et al., J. Immunol. 156:683-92, 1996; Demotz, et al., Nature 342:682-84, 1989); or the number of peptide-HLA class I complexes can be estimated by measuring the amount of lysis or lymphokine release induced by infected or transfected target cells, and then determining the concentration of peptide necessary to obtained equivalent levels of lysis or lymphokine release (see, e.g., Kageyama, et al., J. Immunol. 154:567-76, 1995).

[0730] Atlernatively, immunogenicity can be evaluated through in vivo injections into mice and subsequent in vitro assessment of CTL and HTL activity, which are analysed using cytotoxicity and proliferation assays, respectively, as detailed e.g., in U.S. Pat. No. 6,534,482 and Alexander, et al., Immunity 1:751-61, 1994.

[0731] For example, to assess the capacity of a DNA minigene construct (e.g., a pMin minigene construct generated as described in U.S. Pat. No. 6,534,482) containing at least one HLA-A2 supermotif peptide to induce CTLs in vivo, HLA-A2.1/K^{b} transgenic mice, for example, are immunized intramuscularly with 100 μg of naked cDNA. As a means of comparing the level of CTLs induced by cDNA immunization, a control group of animals is also immunized with an actual peptide composition that comprises multiple epitopes synthesized as a single polypeptide as they would be encoded by the minigene.

[0732] Splenocytes from immunized animals are subsequently stimulated with each of the respective compositions (peptide epitopes encoded in the minigene or the polyepitopic peptide), then assayed for peptide-specific cytotoxic activity in a ⁵¹Cr release assay. The results indicate the magnitude of the CTL response directed against the A2-restricted epitope, thus indicating the in vivo immunogenicity of the minigene vaccine and polyepitopic vaccine. It is, therefore, found that the minigene elicits immune responses directed toward the HLA-A2 supermotif peptide epitopes as does the polyepitopic peptide vaccine. A similar analysis is also performed using other HLA-A3 and HLA-B7 transgenic mouse models to assess CTL induction by HLA-A3 and HLA-B7 motif or supermotif epitopes.

[0733] Alternatively, an in situ ELISA assay may be used to evaluate immunogenicity. The assay is performed as described in Example 9.

[0734] To assess the capacity of a class II epitope encoding minigene to induce HTLs in vivo, DR transgenic mice, or for those epitope that cross react with the appropriate mouse MHC molecule, I-A^{b}-restricted mice, for example, are immunized intramuscularly with 100 μg of plasmid DNA. As a means of comparing the level of HTLs induced by DNA immunization, a group of control animals is also immunized with an actual peptide composition emulsified in complete Freund's adjuvant. CD4⁺ T cells, i.e. HTLs, are purified from splenocytes of immunized animals and stimulated with each of the respective compositions (peptides encoded in the minigene). The HTL response is measured by using a ³H-thymidine incorporation proliferation assay, (see, e.g., Alexander et al. Immunity 1:751-761, 1994) or by ELISPOT. The results of either assay indicate the magnitude of the HTL response, thus demonstrating the in vivo immunogenicity of the minigene.

[0735] Mouse CD4⁺ ELISPOT Assay

[0736] MHC class II restricted responses are measured using an IFN-γ ELISPOT assay. Purified splenic CD4⁺ cells (4×10⁵/well), isolated using MACS columns (Milteny), and irradiated splenocytes (1×10⁵ cells/well) are added to membrane-backed 96 well ELISA plates (Millipore) pre-coated with monoclonal antibody specific for murine IFN-γ (Mabtech). Cells are cultured with 10 μg/ml peptide for 20 hours at 37 degrees C. The IFN-γ secreting cells are detected by incubation with biotinylated anti-mouse IFN-γ antibody (Mabtech), followed by incubation with Avidin-Peroxidase Complex (Vectastain). The plates are developed using AEC (3-amino-9-ethyl-carbazole; Sigma), washed and dried. Spots are counted using the Zeiss KS ELISPOT reader and the results are presented as the number of IFN-γ spot forming cells (“SFC”) per 10⁶ CD4⁺ T cells.

Mouse CD8⁺ ELISPOT Assay

[0737] MHC class II restricted responses are measured using an IFN-γ ELISPOT assay. Purified splenic CD4⁺ cells (4×10⁵/well), isolated using MACS columns (Milteny), and irradiated splenocytes (1×10⁵ cells/well) are added to membrane-backed 96 well ELISA plates (Millipore) pre-coated with monoclonal antibody specific for murine IFN-γ (Mabtech). Cells are cultured with 10 μg/ml peptide and target cells for 20 hours at 37 degrees C. The IFN-γ secreting cells are detected by incubation with biotinylated anti-mouse IFN-γ antibody (Mabtech), followed by incubation with Avidin-Peroxidase Complex (Vectastain). The plates are developed using AEC (3-amino-9-ethyl-carbazole; Sigma), washed and dried. Spots are counted using the Zeiss KS ELISPOT reader and the results are presented as the number of IFN-γ spot forming cells (“SFC”) per 106 CD4⁺ T cells.

[0738] Human IFN-γ ELISPOT Assay

[0739] PBMC responses to the panel of CTL or HTL epitope peptides are evaluated using an IFN-γ ELISPOT assay. Briefly, membrane-based 96 well plates (Millipore, Bedford, Mass.) are coated overnight at 4 degrees C. with the murine monoclonal antibody specific for human IFN-γ (Clone 1-D1k, Mabtech Inc., Cincinnati, Ohio) at the concentration of 5 μg/ml. After washing with PBS, RPMI+10% heat-inactivated human AB serum is added to each well and incubated at 37 degrees C. for at least 1 hour to block membranes. The CTL or HTL epitope peptides are diluted in AIM-V media and added to triplicate wells in a volume of 100 μl at a final concentration of 10 γg/ml. Cryopreserved PBMC are thawed, resuspended in AIM-V at a concentration of 1×10⁶ PBMC/ml and dispensed in 100 μl volumes into test wells. The assay plates are incubated at 37 degrees C. for 40 hours after which they are washed with PBS+0.05% Tween 20. To each well, 100 μl of biotinylated monoclonal antibody specific for human IFN-γ (Clone 7-B6-1, Mabtech) at a concentration of 2 μg/ml is added and plates are incubated at 37 degrees C. for 2 hours. The plates are again washed avidin-peroxidase complex (Vectastain Elite kit) is added to each well, and the plates are incubated at room temperature for 1 hour. The plates are then developed and read as described above.

[0740] DNA minigenes, constructed as describe in Example 11, may also be evaluated as a vaccine in combination with a boosting agent using a prime boost protocol. The boosting agent can consist of recombinant protein (e.g., Barnett, et al., Aids Res. and Human Retroviruses 14, Suppl. 3:S299-S309, 1998) or recombinant vaccinia, for example, expressing a minigene or DNA encoding the complete protein of interest (see, e.g., Hanke, et al., Vaccine 16:439-45, 1998; Sedegah, et al., Proc. Natl. Acad. Sci U.S.A. 95:7648-53, 1998; Hanke and McMichael, Immunol. Lett. 66:177-81, 1999; and Robinson, et al., Nature Med. 5:526-34, 1999).

[0741] For example, the efficacy of the DNA minigene used in a prime boost protocol is initially evaluated in transgenic mice. In this example, A2.1/K^{b} transgenic mice are immunized IM with 100 μg of a DNA minigene encoding the immunogenic peptides including at least one HLA-A2 supermotif-bearing peptide. After an incubation period (ranging from 3-9 weeks), the mice are boosted IP with 10⁷ pfu/mouse of a recombinant vaccinia virus expressing the same sequence encoded by the DNA minigene. Control mice are immunized with 100 μg of DNA or recombinant vaccinia without the minigene sequence, or with DNA encoding the minigene, but without the vaccinia boost. After an additional incubation period of two weeks, splenocytes from the mice are immediately assayed for peptide-specific activity in an ELISPOT assay. Additionally, splenocytes are stimulated in vitro with the A2-restricted peptide epitopes encoded in the minigene and recombinant vaccinia, then assayed for peptide-specific activity in an in situ IFN-γ ELISA.

[0742] It is found that the minigene utilized in a prime-boost protocol elicits greater immune responses toward the HLA-A2 supermotif peptides than with DNA alone. Such an analysis can also be performed using HLA-A11 or HLA-B7 transgenic mouse models to assess CTL induction by HLA-A3 or HLA-B7 motif or supermotif epitopes.

[0743] The use of prime boost protocols in humans is described in Example 20.

[0744] Results from experiments described in this Example can be seen in FIGS. 13a, 13b, 15a, 15b, 17a, 17b, 19a and 19b.

### Example 14

### Peptide Composition for Prophylactic Uses

[0745] Vaccine compositions of the present invention can be used to prevent HPV infection in persons who are at risk for such infection. For example, a polyepitopic peptide epitope composition (or a nucleic acid comprising the same) containing multiple CTL and HTL epitopes such as those selected in Examples 9 and/or 10, which are also selected to target greater than 80% of the population, is administered to individuals at risk for HPV infection.

[0746] For example, a peptide-based composition can be provided as a single polypeptide that encompasses multiple epitopes. The vaccine is typically administered in a physiological solution that comprises an adjuvant, such as Incomplete Freunds Adjuvant (“IFA”). The dose of peptide for the initial immunization is from about 1 to about 50,000 μg, generally 100-5,000 μg, for a 70 kg patient. The initial administration of vaccine is followed by booster dosages at 4 weeks followed by evaluation of the magnitude of the immune response in the patient, by techniques that determine the presence of epitope-specific CTL populations in a PBMC sample. Additional booster doses are administered as required. The composition is found to be both safe and efficacious as a prophylaxis against HPV infection.

[0747] Alternatively, a composition typically comprising transfecting agents can be used for the administration of a nucleic acid-based vaccine in accordance with methodologies known in the art and disclosed herein.

### Example 15

### Polyepitopic Vaccine Compositions Derived from Native HPV Sequences

[0748] A native HPV polyprotein sequence is screened, preferably using computer algorithms defined for each class I and/or class II supermotif or motif, to identify “relatively short” regions of the polyprotein that comprise multiple epitopes and is preferably less in length than an entire native antigen. This relatively short sequence that contains multiple distinct, even overlapping, epitopes is selected and used to generate a minigene construct. The construct is engineered to express the peptide, which corresponds to the native protein sequence. The “relatively short” peptide is generally less than 250 amino acids in length, often less than 100 amino acids in length, preferably less than 75 amino acids in length, and more preferably less than 50 amino acids in length. The protein sequence of the vaccine composition is selected because it has maximal number of epitopes contained within the sequence, i.e., it has a high concentration of epitopes. As noted herein, epitope motifs may be nested or overlapping (i.e., frame shifted relative to one another). For example, with overlapping epitopes, two 9-mer epitopes and one 10-mer epitope can be present in a 10 amino acid peptide. Such a vaccine composition is administered for therapeutic or prophylactic purposes.

[0749] The vaccine composition will include, for example, three CTL epitopes from at least one HPV target antigen and at least one HTL epitope. This polyepitopic native sequence is administered either as a peptide or as a nucleic acid sequence which encodes the peptide. Alternatively, an analog can be made of this native sequence, whereby one or more of the epitopes comprise substitutions that alter the cross-reactivity and/or binding affinity properties of the polyepitopic peptide.

[0750] The embodiment of this example provides for the possibility that an as yet undiscovered aspect of immune system processing will apply to the native nested sequence and thereby facilitate the production of therapeutic or prophylactic immune response-inducing vaccine compositions. Additionally such an embodiment provides for the possibility of motif-bearing epitopes for an HLA makeup that is presently unknown. Furthermore, this embodiment (absent analogs) directs the immune response to multiple peptide sequences that are actually present in native HPV antigens thus avoiding the need to evaluate any junctional epitopes. Lastly, the embodiment provides an economy of scale when producing nucleic acid vaccine compositions.

[0751] Related to this embodiment, computer programs can be derived in accordance with principles in the art, which identify in a target sequence, the greatest number of epitopes per sequence length.

### Example 16

### Polyepitopic Vaccine Compositions from Multiple Antigens

[0752] The HPV peptide epitopes of the present invention are used in conjunction with peptide epitopes from other target tumor-associated antigens to create a vaccine composition that is useful for the prevention or treatment of cancer resulting from HPV infection in multiple patients.

[0753] For example, a vaccine composition can be provided as a single polypeptide that incorporates multiple epitopes from HPV antigens as well as tumor-associated antigens that are often expressed with a target cancer, e.g., cervical cancer, associated with HPV infection, or can be administered as a composition comprising one or more discrete epitopes. Alternatively, the vaccine can be administered as a minigene construct or as dendritic cells which have been loaded with the peptide epitopes in vitro.

### Example 17

### Use of Peptides to Evaluate an Immune Response

[0754] Peptides of the invention may be used to analyze an immune response for the presence of specific CTL or HTL populations directed to HPV. Such an analysis may be performed in a manner as that described by Ogg, et al., Science 279:2103-06, 1998. In the following example, peptides in accordance with the invention are used as a reagent for diagnostic or prognostic purposes, not as an immunogen.

[0755] In this example highly sensitive human leukocyte antigen tetrameric complexes (“tetramers”) are used for a cross-sectional analysis of, for example, HPV HLA-A*0201-specific CTL frequencies from HLA A*0201-positive individuals at different stages of infection or following immunization using an HPV peptide containing an A*0201 motif. Tetrameric complexes are synthesized as described (Musey, et al., N. Engl. J. Med. 337:1267, 1997). Briefly, purified HLA heavy chain (A*0201 in this example) and β2-microglobulin are synthesized by means of a prokaryotic expression system. The heavy chain is modified by deletion of the transmembrane-cytosolic tail and COOH-terminal addition of a sequence containing a BirA enzymatic biotinylation site. The heavy chain, β2-microglobulin, and peptide are refolded by dilution. The 45-kD refolded product is isolated by fast protein liquid chromatography and then biotinylated by BirA in the presence of biotin (Sigma, St. Louis, Mo.), adenosine 5′triphosphate and magnesium. Streptavidin-phycoerythrin conjugate is added in a 1:4 molar ratio, and the tetrameric product is concentrated to 1 mg/ml. The resulting product is referred to as tetramer-phycoerythrin.

[0756] For the analysis of patient blood samples, approximately one million PBMCs are centrifuged at 300 g for 5 minutes and resuspended in 50 μl of cold phosphate-buffered saline. Tri-color analysis is performed with the tetramer-phycoerythrin, along with anti-CD8-Tricolor, and anti-CD38. The PBMCs are incubated with tetramer and antibodies on ice for 30 to 60 min and then washed twice before formaldehyde fixation. Gates are applied to contain >99.98% of control samples. Controls for the tetramers include both A*0201-negative individuals and A*0201-positive uninfected donors. The percentage of cells stained with the tetramer is then determined by flow cytometry. The results indicate the number of cells in the PBMC sample that contain epitope-restricted CTLs, thereby readily indicating the extent of immune response to the HPV epitope, and thus the stage of infection with HPV, the status of exposure to HPV, or exposure to a vaccine that elicits a protective or therapeutic response.

### Example 18

### Use of Peptide Epitopes to Evaluate Recall Responses

[0757] The peptide epitopes of the invention are used as reagents to evaluate T cell responses, such as acute or recall responses, in patients. Such an analysis may be performed on patients who have recovered from infection, who are chronically infected with HPV, or who have been vaccinated with an HPV vaccine.

[0758] For example, the class I restricted CTL response of persons who have been vaccinated may be analyzed. The vaccine may be any HPV vaccine. PBMC are collected from vaccinated individuals and HLA typed. Appropriate peptide epitopes of the invention that, optimally, bear supermotifs to provide cross-reactivity with multiple HLA supertype family members, are then used for analysis of samples derived from individuals who bear that HLA type.

[0759] PBMC from vaccinated individuals are separated on Ficoll-Histopaque density gradients (Sigma Chemical Co., St. Louis, Mo.), washed three times in HBSS (Invitrogen Life Technologies, Carlsbad, Calif.), resuspended in RPMI-1640 (Invitrogen Life Technologies, Carlsbad, Calif.) supplemented with L-glutamine (2 mM), penicillin (50 U/ml), streptomycin (50 μg/ml), and Hepes (10 mM) containing 10% heat-inactivated human AB serum (complete RPMI) and plated using microculture formats. A synthetic peptide comprising an epitope of the invention is added to each well at a concentration of 10 μg/ml and HBV core 128-140 epitope is added at 1 μg/ml to each well as a source of T cell help during the first week of stimulation.

[0760] Cytotoxicity assays may be performed in several ways well known in the art. Several non-limiting examples follow.

[0761] A Direct Cellular Cytotoxicity Assay

[0762] In the microculture format, 4×10⁵ PBMC are stimulated with peptide in 8 replicate cultures in 96-well round bottom plate in 100 μl/well of complete RPMI. On days 3 and 10, 100 μl of complete RPMI and 20 U/ml final concentration of rIL-2 are added to each well. On day 7 the cultures are transferred into a 96-well flat-bottom plate and restimulated with peptide, rIL-2 and 10⁵ irradiated (3,000 rad) autologous feeder cells. The cultures are tested for cytotoxic activity on day 14. A positive CTL response requires two or more of the eight replicate cultures to display greater than 10% specific ⁵¹Cr release, based on comparison with uninfected control subjects as previously described (Rehermann, et al., Nature Med. 2:1104, 1996; Rehermann, et al., J. Clin. Invest. 97:1655-65, 1996; and Rehermann, et al., J. Clin. Invest. 98:1432-40, 1996).

[0763] Target cell lines are autologous and allogeneic EBV-transformed B-LCL that are either purchased from the American Society for Histocompatibility and Immunogenetics (ASHI, Boston, Mass.) or established from the pool of patients as described (Guilhot, et al. J. Virol. 66:2670-78, 1992).

[0764] Target cells consist of either allogeneic HLA-matched or autologous EBV-transformed B lymphoblastoid cell line that are incubated overnight with the synthetic peptide epitope of the invention at 10 μM, and labeled with 100 μCi of ⁵¹Cr (Amersham Corp., Arlington Heights, Ill.) for 1 hour after which they are washed four times with HBSS.

[0765] Cytolytic activity is determined in a standard 4-h, split well ⁵¹Cr release assay using U-bottomed 96 well plates containing 3,000 targets/well. Stimulated PBMC are tested at effector/target (E/T) ratios of 20-50:1 on day 14. Percent cytotoxicity is determined from the formula: 100×[(experimental release-spontaneous release)/maximum release-spontaneous release)]. Maximum release is determined by lysis of targets by detergent (2% Triton X-100; Sigma Chemical Co., St. Louis, Mo.). Spontaneous release is <25% of maximum release for all experiments.

[0766] ELISPOT Assay

[0767] An ELISPOT assay may be performed essentially as described in Example 13.

[0768] The results of either analysis indicate the extent to which HLA-restricted CTL populations have been stimulated by previous exposure to HPV or an HPV vaccine.

[0769] The class II restricted HTL responses may also be analyzed in several ways that are well known in the art.

[0770] A Direct Cellular Antigen-Specific T Cell Proliferation Assay

[0771] Purified PBMC are cultured in a 96-well flat bottom plate at a density of 1.5×10⁵ cells/well and are stimulated with 10 μg/ml synthetic peptide, whole antigen, or PHA. Cells are routinely plated in replicates of 4-6 wells for each condition. After seven days of culture, the medium is removed and replaced with fresh medium containing 10 U/ml IL-2. Two days later, 1 μCi ³H-thymidine is added to each well and incubation is continued for an additional 18 hours. Cellular DNA is then harvested on glass fiber mats and analyzed for ³H-thymidine incorporation. Antigen-specific T cell proliferation is calculated as the ratio of ³H-thymidine incorporation in the presence of antigen divided by the ³H-thymidine incorporation in the absence of antigen.

[0772] ELISPOT Antigen-Specific T Cell Proliferation Assay

[0773] An ELISPOT antigen-specific T cell proliferation assay may be performed to analyze a class II restricted helper T cell response. The assay is performed essentially as described in Example 13.

### Example 19

### Induction of Specific CTL Response in Humans

[0774] A human clinical trial for an immunogenic composition comprising CTL and HTL epitopes of the invention is set up as an IND Phase I, dose escalation study and carried out as a randomized, double-blind, placebo-controlled trial. Such a trial is designed, for example, as follows:

[0775] A total of about 27 individuals are enrolled and divided into 3 groups:

[0776] Group I: 3 subjects are injected with placebo and 6 subjects are injected with 5 μg of peptide composition;

[0777] Group II: 3 subjects are injected with placebo and 6 subjects are injected with 50 μg peptide composition;

[0778] Group III: 3 subjects are injected with placebo and 6 subjects are injected with 500 μg of peptide composition.

[0779] After 4 weeks following the first injection, all subjects receive a booster inoculation at the same dosage.

[0780] The endpoints measured in this study relate to the safety and tolerability of the peptide composition as well as its immunogenicity. Cellular immune responses to the peptide composition are an index of the intrinsic activity of this the peptide composition, and can therefore be viewed as a measure of biological efficacy. The following summarize the clinical and laboratory data that relate to safety and efficacy endpoints.

[0781] Safety: The incidence of adverse events is monitored in the placebo and drug treatment group and assessed in terms of degree and reversibility.

[0782] Evaluation of Vaccine Efficacy: For evaluation of vaccine efficacy, subjects are bled before and after injection. Peripheral blood mononuclear cells are isolated from fresh heparinized blood by Ficoll-Hypaque density gradient centrifugation, aliquoted in freezing media and stored frozen. Samples are assayed for CTL and HTL activity.

[0783] An acceptable vaccine is found to be both safe and efficacious.

### Example 20

### Phase II Trials in Patients Infected with HPV

[0784] Phase II trials are performed to study the effect of administering the CTL-HTL peptide compositions to patients having cancer associated with HPV infection. The main objectives of the trials are to determine an effective dose and regimen for inducing CTLs in HPV-infected patients with cancer, to establish the safety of inducing a CTL and HTL response in these patients, and to see to what extent activation of CTLs improves the clinical picture of chronically infected HPV patients, as manifested by a reduction in viral load, e.g., the reduction and/or shrinking of lesions. Such a study is designed, for example, as follows.

[0785] The studies are performed in multiple centers. The trial design is an open-label, uncontrolled, dose escalation protocol wherein the peptide composition is administered as a single dose followed six weeks later by a single booster shot of the same dose. The dosages are 50, 500 and 5,000 micrograms per injection. Drug-associated adverse effects (severity and reversibility) are recorded.

[0786] There are three patient groupings. The first group is injected with 50 micrograms of the peptide composition and the second and third groups with 500 and 5,000 micrograms of peptide composition, respectively. The patients within each group range in age from 21-65 and represent diverse ethnic backgrounds. All of them are infected with HPV and are HIV, HCV, HBV and delta hepatitis virus (HDV) negative, but are positive for HPV DNA as monitered by PCR.

[0787] Clinical manifestations or antigen-specific T-cell responses are monitored to assess the effects of administering the peptide compositions. An acceptable vaccine composition is found to be both safe and efficacious in the treatment of HPV infection.

### Example 21

### Induction of CTL Responses Using a Prime Boost Protocol

[0788] A prime boost protocol similar in its underlying principle to that used to evaluate the efficacy of a DNA vaccine in transgenic mice, such as described in Example 12, can also be used for the administration of the vaccine to humans. Such a vaccine regimen can include an initial administration of, for example, naked DNA followed by a boost using recombinant virus encoding the vaccine, or recombinant protein/polypeptide or a peptide mixture administered in an adjuvant.

[0789] For example, the initial immunization may be performed using an expression vector, such as that constructed in Example 11, in the form of naked polynucleotide administered IM (or SC or ID) in the amounts of 0.5-5 mg at multiple sites. The polynucleotide (0.1 to 1000 μg) can also be administered using a gene gun. Following an incubation period of 3-4 weeks, a booster dose is then administered. The booster can be recombinant fowlpox virus administered at a dose of 5×10⁷ to 5×10⁹ pfu. An alternative recombinant virus, such as an MVA (for example, modified Vaccinia Virus Ankara (“MVA-BN,” Bavarian-Nordic)), canarypox, adenovirus, or adeno-associated virus, can also be used for the booster, or the polyepitopic protein or a mixture of the peptides can be administered. For evaluation of vaccine efficacy, patient blood samples will be obtained before immunization as well as at intervals following administration of the initial vaccine and booster doses of the vaccine. Peripheral blood mononuclear cells are isolated from fresh heparinized blood by Ficoll-Hypaque density gradient centrifugation, aliquoted in freezing media and stored frozen. Samples are assayed for CTL and HTL activity.

[0790] Analysis of the results indicates that a magnitude of response sufficient to achieve protective immunity against HPV is generated.

### Example 22

### Administration of Vaccine Compositions Using Dendritic Cells (DC)

[0791] Vaccines comprising peptide epitopes of the invention can be administered using APCs, or “professional” APCs such as DC. In this example, the peptide-pulsed DC are administered to a patient to stimulate a CTL response in vivo. In this method, dendritic cells are isolated, expanded, and pulsed with a vaccine comprising peptide CTL and HTL epitopes of the invention. The dendritic cells are infused back into the patient to elicit CTL and HTL responses in vivo. The induced CTL and HTL then destroy or facilitate destruction of the specific target cells that bear the proteins from which the epitopes in the vaccine are derived.

[0792] For example, a cocktail of epitope-bearing peptides is administered ex vivo to PBMC, or isolated DC therefrom. A pharmaceutical to facilitate harvesting of DC can be used, such as Progenipoietin (Monsanto, St. Louis, Mo.) or GM-CSF/IL-4. After pulsing the DC with peptides and prior to reinfusion into patients, the DC are washed to remove unbound peptides.

[0793] As appreciated clinically, and readily determined by one of skill based on clinical outcomes, the number of DC reinfused into the patient can vary (see, e.g., Nature Med. 4:328, 1998; Nature Med. 2:52, 1996 and Prostate 32:272, 1997). Although 2-50×10⁶ DC per patient are typically administered, larger number of DC, such as 10⁷ or 10⁸ can also be provided. Such cell populations typically contain between 50-90% DC.

[0794] In some embodiments, peptide-loaded PBMC are injected into patients without purification of the DC. For example, PBMC containing DC generated after treatment with an agent such as Progenipoietin are injected into patients without purification of the DC. The total number of PBMC that are administered often ranges from 10⁸ to 10¹⁰. Generally, the cell doses injected into patients is based on the percentage of DC in the blood of each patient, as determined, for example, by immunofluorescence analysis with specific anti-DC antibodies. Thus, for example, if Progenipoietin™ mobilizes 2% DC in the peripheral blood of a given patient, and that patient is to receive 5×10⁶ DC, then the patient will be injected with a total of 2.5×10⁸ peptide-loaded PBMC. The percent DC mobilized by an agent such as Progenipoietin is typically estimated to be between 2-10%, but can vary as appreciated by one of skill in the art.

[0795] Ex Vivo Activation of CTL/HTL Responses

[0796] Alternatively, ex vivo CTL or HTL responses to HPV antigens can be induced by incubating in tissue culture the patient's, or genetically compatible, CTL or HTL precursor cells together with a source of APC, such as DC, and the appropriate immunogenic peptides. After an appropriate incubation time (typically about 7-28 days), in which the precursor cells are activated and expanded into effector cells, the cells are infused back into the patient, where they will destroy (CTL) or facilitate destruction (HTL) of their specific target cells, i.e., tumor cells.

### Example 23

### Alternative Method of Identifying Motif-Bearing Peptides

[0797] Another method of identifying motif-bearing peptides is to elute them from cells bearing defined MHC molecules. For example, EBV transformed B cell lines used for tissue typing have been extensively characterized to determine which HLA molecules they express. In certain cases these cells express only a single type of HLA molecule. These cells can be infected with a pathogenic organism or transfected with nucleic acids that express the antigen of interest, e.g. HPV regulatory or structural proteins. Peptides produced by endogenous antigen processing of peptides produced consequent to infection (or as a result of transfection) will then bind to HLA molecules within the cell and be transported and displayed on the cell surface. Peptides are then eluted from the HLA molecules by exposure to mild acid conditions and their amino acid sequence determined, e.g., by mass spectral analysis (e.g., Kubo, et al., J. Immunol. 152:3913, 1994). Because the majority of peptides that bind a particular HLA molecule are motif-bearing, this is an alternative modality for obtaining the motif-bearing peptides correlated with the particular HLA molecule expressed on the cell.

[0798] Alternatively, cell lines that do not express endogenous HLA molecules can be transfected with an expression construct encoding a single HLA allele. These cells can then be used as described, i.e., they can be infected with a pathogen or transfected with nucleic acid encoding an antigen of interest to isolate peptides corresponding to the pathogen or antigen of interest that have been presented on the cell surface. Peptides obtained from such an analysis will bear motif(s) that correspond to binding to the single HLA allele that is expressed in the cell.

[0799] As appreciated by one in the art, one can perform a similar analysis on a cell bearing more than one HLA allele and subsequently determine peptides specific for each HLA allele expressed. Moreover, one of skill would also recognize that means other than infection or transfection, such as loading with a protein antigen, can be used to provide a source of antigen to the cell.

[0800] The above examples are provided to illustrate the invention but not to limit its scope. For example, the human terminology for the Major Histocompatibility Complex, namely HLA, is used throughout this document. It is to be appreciated that these principles can be extended to other species as well. Thus, other variants of the invention will be readily apparent to one of ordinary skill in the art and are encompassed by the appended claims. All publications, patents, and patent applications, and all figures, drawings, and sequence listings associated therewith, cited herein are hereby incorporated by reference for all purposes.

LENGTHY TABLE REFERENCED HERE
US20070014810A1-20070118-T00001
Please refer to the end of the specification for access instructions.

LENGTHY TABLE REFERENCED HERE
US20070014810A1-20070118-T00002
Please refer to the end of the specification for access instructions.

LENGTHY TABLE REFERENCED HERE
US20070014810A1-20070118-T00003
Please refer to the end of the specification for access instructions.

LENGTHY TABLE REFERENCED HERE
US20070014810A1-20070118-T00004
Please refer to the end of the specification for access instructions.

LENGTHY TABLE REFERENCED HERE
US20070014810A1-20070118-T00005
Please refer to the end of the specification for access instructions.

LENGTHY TABLE REFERENCED HERE
US20070014810A1-20070118-T00006
Please refer to the end of the specification for access instructions.

LENGTHY TABLE REFERENCED HERE
US20070014810A1-20070118-T00007
Please refer to the end of the specification for access instructions.

LENGTHY TABLE REFERENCED HERE
US20070014810A1-20070118-T00008
Please refer to the end of the specification for access instructions.

LENGTHY TABLE REFERENCED HERE
US20070014810A1-20070118-T00009
Please refer to the end of the specification for access instructions.

LENGTHY TABLE REFERENCED HERE
US20070014810A1-20070118-T00010
Please refer to the end of the specification for access instructions.

LENGTHY TABLE REFERENCED HERE
US20070014810A1-20070118-T00011
Please refer to the end of the specification for access instructions.

LENGTHY TABLE REFERENCED HERE
US20070014810A1-20070118-T00012
Please refer to the end of the specification for access instructions.

LENGTHY TABLE REFERENCED HERE
US20070014810A1-20070118-T00013
Please refer to the end of the specification for access instructions.

LENGTHY TABLE REFERENCED HERE
US20070014810A1-20070118-T00014
Please refer to the end of the specification for access instructions.

LENGTHY TABLE REFERENCED HERE
US20070014810A1-20070118-T00015
Please refer to the end of the specification for access instructions.

LENGTHY TABLE REFERENCED HERE
US20070014810A1-20070118-T00016
Please refer to the end of the specification for access instructions.

LENGTHY TABLE REFERENCED HERE
US20070014810A1-20070118-T00017
Please refer to the end of the specification for access instructions.

LENGTHY TABLE REFERENCED HERE
US20070014810A1-20070118-T00018
Please refer to the end of the specification for access instructions.

LENGTHY TABLE REFERENCED HERE
US20070014810A1-20070118-T00019
Please refer to the end of the specification for access instructions.

LENGTHY TABLE REFERENCED HERE
US20070014810A1-20070118-T00020
Please refer to the end of the specification for access instructions.

LENGTHY TABLE REFERENCED HERE
US20070014810A1-20070118-T00021
Please refer to the end of the specification for access instructions.

LENGTHY TABLE REFERENCED HERE
US20070014810A1-20070118-T00022
Please refer to the end of the specification for access instructions.

LENGTHY TABLE REFERENCED HERE
US20070014810A1-20070118-T00023
Please refer to the end of the specification for access instructions.

LENGTHY TABLE REFERENCED HERE
US20070014810A1-20070118-T00024
Please refer to the end of the specification for access instructions.

LENGTHY TABLE REFERENCED HERE
US20070014810A1-20070118-T00025
Please refer to the end of the specification for access instructions.

LENGTHY TABLE REFERENCED HERE
US20070014810A1-20070118-T00026
Please refer to the end of the specification for access instructions.

LENGTHY TABLE REFERENCED HERE
US20070014810A1-20070118-T00027
Please refer to the end of the specification for access instructions.

LENGTHY TABLE REFERENCED HERE
US20070014810A1-20070118-T00028
Please refer to the end of the specification for access instructions.

LENGTHY TABLE REFERENCED HERE
US20070014810A1-20070118-T00029
Please refer to the end of the specification for access instructions.

LENGTHY TABLE REFERENCED HERE
US20070014810A1-20070118-T00030
Please refer to the end of the specification for access instructions.

LENGTHY TABLE REFERENCED HERE
US20070014810A1-20070118-T00031
Please refer to the end of the specification for access instructions.

LENGTHY TABLE REFERENCED HERE
US20070014810A1-20070118-T00032
Please refer to the end of the specification for access instructions.

LENGTHY TABLE REFERENCED HERE
US20070014810A1-20070118-T00033
Please refer to the end of the specification for access instructions.

LENGTHY TABLE REFERENCED HERE
US20070014810A1-20070118-T00034
Please refer to the end of the specification for access instructions.

LENGTHY TABLE REFERENCED HERE
US20070014810A1-20070118-T00035
Please refer to the end of the specification for access instructions.

LENGTHY TABLE REFERENCED HERE
US20070014810A1-20070118-T00036
Please refer to the end of the specification for access instructions.

LENGTHY TABLE REFERENCED HERE
US20070014810A1-20070118-T00037
Please refer to the end of the specification for access instructions.

LENGTHY TABLE REFERENCED HERE
US20070014810A1-20070118-T00038
Please refer to the end of the specification for access instructions.

LENGTHY TABLE REFERENCED HERE
US20070014810A1-20070118-T00039
Please refer to the end of the specification for access instructions.

LENGTHY TABLE REFERENCED HERE
US20070014810A1-20070118-T00040
Please refer to the end of the specification for access instructions.

LENGTHY TABLE REFERENCED HERE
US20070014810A1-20070118-T00041
Please refer to the end of the specification for access instructions.

LENGTHY TABLE REFERENCED HERE
US20070014810A1-20070118-T00042
Please refer to the end of the specification for access instructions.

LENGTHY TABLE REFERENCED HERE
US20070014810A1-20070118-T00043
Please refer to the end of the specification for access instructions.

LENGTHY TABLE REFERENCED HERE
US20070014810A1-20070118-T00044
Please refer to the end of the specification for access instructions.

LENGTHY TABLE REFERENCED HERE
US20070014810A1-20070118-T00045
Please refer to the end of the specification for access instructions.

LENGTHY TABLE REFERENCED HERE
US20070014810A1-20070118-T00046
Please refer to the end of the specification for access instructions.

LENGTHY TABLE REFERENCED HERE
US20070014810A1-20070118-T00047
Please refer to the end of the specification for access instructions.

LENGTHY TABLE REFERENCED HERE
US20070014810A1-20070118-T00048
Please refer to the end of the specification for access instructions.

LENGTHY TABLE REFERENCED HERE
US20070014810A1-20070118-T00049
Please refer to the end of the specification for access instructions.

LENGTHY TABLE REFERENCED HERE
US20070014810A1-20070118-T00050
Please refer to the end of the specification for access instructions.

LENGTHY TABLE REFERENCED HERE
US20070014810A1-20070118-T00051
Please refer to the end of the specification for access instructions.

LENGTHY TABLE REFERENCED HERE
US20070014810A1-20070118-T00052
Please refer to the end of the specification for access instructions.

LENGTHY TABLE REFERENCED HERE
US20070014810A1-20070118-T00053
Please refer to the end of the specification for access instructions.

LENGTHY TABLE REFERENCED HERE
US20070014810A1-20070118-T00054
Please refer to the end of the specification for access instructions.

LENGTHY TABLE REFERENCED HERE
US20070014810A1-20070118-T00055
Please refer to the end of the specification for access instructions.

LENGTHY TABLE REFERENCED HERE
US20070014810A1-20070118-T00056
Please refer to the end of the specification for access instructions.

LENGTHY TABLE REFERENCED HERE
US20070014810A1-20070118-T00057
Please refer to the end of the specification for access instructions.

LENGTHY TABLE REFERENCED HERE
US20070014810A1-20070118-T00058
Please refer to the end of the specification for access instructions.

LENGTHY TABLE REFERENCED HERE
US20070014810A1-20070118-T00059
Please refer to the end of the specification for access instructions.

LENGTHY TABLE REFERENCED HERE
US20070014810A1-20070118-T00060
Please refer to the end of the specification for access instructions.

LENGTHY TABLE REFERENCED HERE
US20070014810A1-20070118-T00061
Please refer to the end of the specification for access instructions.

LENGTHY TABLE REFERENCED HERE
US20070014810A1-20070118-T00062
Please refer to the end of the specification for access instructions.

LENGTHY TABLE REFERENCED HERE
US20070014810A1-20070118-T00063
Please refer to the end of the specification for access instructions.

LENGTHY TABLE REFERENCED HERE
US20070014810A1-20070118-T00064
Please refer to the end of the specification for access instructions.

LENGTHY TABLE REFERENCED HERE
US20070014810A1-20070118-T00065
Please refer to the end of the specification for access instructions.

LENGTHY TABLE REFERENCED HERE
US20070014810A1-20070118-T00066
Please refer to the end of the specification for access instructions.

LENGTHY TABLE REFERENCED HERE
US20070014810A1-20070118-T00067
Please refer to the end of the specification for access instructions.

LENGTHY TABLE REFERENCED HERE
US20070014810A1-20070118-T00068
Please refer to the end of the specification for access instructions.

LENGTHY TABLE REFERENCED HERE
US20070014810A1-20070118-T00069
Please refer to the end of the specification for access instructions.

LENGTHY TABLE REFERENCED HERE
US20070014810A1-20070118-T00070
Please refer to the end of the specification for access instructions.

LENGTHY TABLE REFERENCED HERE
US20070014810A1-20070118-T00071
Please refer to the end of the specification for access instructions.

LENGTHY TABLE REFERENCED HERE
US20070014810A1-20070118-T00072
Please refer to the end of the specification for access instructions.

LENGTHY TABLE REFERENCED HERE
US20070014810A1-20070118-T00073
Please refer to the end of the specification for access instructions.

LENGTHY TABLE REFERENCED HERE
US20070014810A1-20070118-T00074
Please refer to the end of the specification for access instructions.

LENGTHY TABLE REFERENCED HERE
US20070014810A1-20070118-T00075
Please refer to the end of the specification for access instructions.

[0801] In other embodiments, the invention provides a polynucleotide selected from the following polynucleotides (a)-(t), each encoding the human papillomavirus (HPV) helper T lymphocyte (HTL) epitopes of Core Group HTL780-21.1/22.1/24.

[0802] (a) A multi-epitope polynucleotide construct comprising nucleic acids encoding the human papillomavirus (HPV) helper T lymphocyte (HTL) epitopes of Core Group HTL780-21.1/22.1/24. These epitopes are: HPV16.E1.319, HPV16.E1.337, HPV18.E1.258, HPV18.E1.458, HPV18.E2.140, HPV31.E1.015, HPV31.E1.317, HPV45.E1.484, HPV45.E1.510, HPV45.E2.352 and HPV45.E2.67, wherein the nucleic acids are directly or indirectly joined to one another in the same reading frame. Note that the nucleic acids encoding the epitopes listed above may be arranged in any order.

[0803] (b) A multi-epitope polynucleotide construct comprising nucleic acids encoding the human papillomavirus (HPV) cytotoxic T lymphocyte (CTL) epitopes of Core Group HTL780-21.1/22.1/24. (hereinafter “the HTL780-21.1/22.1/24. core construct”), and also encoding one or more additional CTL and/or HTL epitopes.

[0804] (c) The HTL780-21.1/22.1/24 core construct as in (a)-(b), where the nucleic acids encoding the epitopes listed above are arranged in a specified order, but may have additional nucleic acids encoding additional epitopes and/or spacer amino acids dispersed therein.

[0805] (d) The HTL780-21.1/22.1/24 core construct as in (a)-(c), where one or more epitope-encoding nucleic acids are flanked by spacer nucleotides, and/or other polynucleotide sequences as described herein or otherwise known in the art. Such spacer nucleotides encode one or more spacer amino acids so as to keep the multi-epitope construct in frame.

[0806] (e) The HTL780-21.1/22.1/24 core construct as in (a)-(d), where the multi-epitopeconstruct is distinguished from other multi-epitopeconstructs according to whether the spacer nucleotides in one construct encode spacer amino acids which optimize epitope processing and/or minimize junctional epitopes with respect to other constructs as described herein or elsewhere.

[0807] (f) The HTL780-21.1/22.1/24 core construct as in (a)-(e), where the multi-epitope construct encodes a polypeptide which is concomitantly optimized for epitope processing and junctional epitopes with respect to one or more other constructs as described herein.

[0808] (g) The HTL780-21.1/22.1/24 core construct as in (a)-(f), where the multi-epitope-construct further comprises a PADRE HTL epitope, as described herein.

[0809] (h) The HTL780-21.1/22.1/24 core construct as in (a)-(g), further comprising nucleic acids encoding HPV HTL epitopes HPV16.E2.156, HPV16.E2.7, HPV31.E2.354, HPV31.E2.67 and HPV18.E2.277.

[0810] (i) The HTL780-21.1/22.1/24 core construct as in (a)-(h), further comprising nucleic acids encoding HPV HTL epitopes HPV16.E2.160, HPV16.E2.19, HPV18.E2.127, HPV18.E2.340 and HPV31.E2.202.

[0811] (j) The HTL780-21.1/22.1/24 core construct as in (h), comprising or alternatively consisting of the multi-epitope construct HTL 780-24 (See Tables 78 and 79).

[0812] (k) The HTL780-21.1/22.1/24 core construct as in (i), comprising or alternatively consisting of the multi-epitope construct HTL 780-21.1 (See Tables 58A and 59).

[0813] (l) The HTL780-21.1/22.1/24 core construct as in (i), comprising or alternatively consisting of the multi-epitope construct HTL 780-22.1 (See Tables 58B and 61).

[0814] (m) The HTL780-21.1/22.1/24 core construct as in (a)-(1), further comprising further comprising any of the HPV 46 core constructs (a)-(m) as described above.

[0815] (n) The HTL780-21.1/22.1/24 core construct as in (a)-(m), further comprising nucleic acids encoding HPV CTL epitopes HPV16.E1.493, HPV31/52.E1.557, HPV31.E2.131, HPV31.E2.127, HPV16.E2.335, HPV16.E2.37, HPV16.E2.93, HPV18.E2.211, HPV18.E2.61, HPV18.E1.266 and HPV18.E1.500.

[0816] (o) The HTL780-21.1/22.1/24 core construct as in (a)-(n), further comprising nucleic acids encoding HPV CTL epitopes HPV16.E1.191, HPV16.E1.292, HPV16.E1.489, HPV16.E1.489, HPV16/52.E1.406, HPV18.E1.210, HPV18.E1.266, HPV18.E1.463, HPV31.E1.464, HPV18/45.E1.284 and HPV31.E1.441.

[0817] (p) The HTL780-21.1/22.1/24 core construct as in (n), comprising or alternatively consisting of the multi-epitope construct HPV 47-1/HTL780.21.1 (See Tables 63A, 64A and 65A).

[0818] (q) The HTL780-21.1/22.1/24 core construct as in (n), comprising or alternatively consisting of the multi-epitope construct HPV 47-1/HTL780.22.1 (See Tables 63B, 64B and 65B).

[0819] (r) The HTL780-21.1/22.1/24 core construct as in (n), comprising or alternatively consisting of the multi-epitope construct HPV 47-2/HTL780.21.1 (See Tables 63C, 64C and 65C).

[0820] (s) The HTL780-21.1/22.1/24 core construct as in (n), comprising or alternatively consisting of the multi-epitope construct HPV 47-2/HTL780.22.1 (See Tables 63D, 64D and 65D).

[0821] (t) The HTL780-21.1/22.1/24 core construct as in (o), comprising or alternatively consisting of the multi-epitope construct HPV 47-3/HTL780.24 (See Tables.

[0822] In other embodiments, the invention provides a polypeptide comprising HTL780-21.1/22.1/24 HTL epitopes encoded by any of polynucleotides (a)-(t) listed above.

LENGTHY TABLE
The patent application contains a lengthy table section. A copy of the table is available in electronic form from the USPTO web site (http://seqdata.uspto.gov/?pageRequest=docDetail&DocID=US20070014810A1) An electronic copy of the table will also be available from the USPTO upon request and payment of the fee set forth in 37 CFR 1.19(b)(3).

The application's sequence listing, which the Patent Office published only in electronic form, follows.

SEQUENCE LISTING (3705 sequences)

SEQ ID NO: 1 - protein, 5 aa, Artificial Sequence
  Description of Artificial Sequence: Synthetic peptide
GPGPG

SEQ ID NO: 2 - protein, 5 aa, Artificial Sequence
  Description of Artificial Sequence: Synthetic peptide
PGPGP

SEQ ID NO: 3 - protein, 22 aa, Artificial Sequence
  Description of Artificial Sequence: Synthetic peptide
  This peptide may encompass 0 to 11 Gly-Pro repeating units
GPGPGPGPGPGPGPGPGPGPGP

SEQ ID NO: 4 - protein, 22 aa, Artificial Sequence
  Description of Artificial Sequence: Synthetic peptide
  This peptide may encompass 0 to 11 Pro-Gly repeating units
PGPGPGPGPGPGPGPGPGPGPG

SEQ ID NO: 5 - protein, 23 aa, Artificial Sequence
  Description of Artificial Sequence: Synthetic peptide
  MOD_RES (1)..(22): This region may encompass 0 to 11 Gly-Pro repeating units
GPGPGPGPGPGPGPGPGPGPGPG

SEQ ID NO: 6 - protein, 23 aa, Artificial Sequence
  Description of Artificial Sequence: Synthetic peptide
  MOD_RES (1)..(22): This region may encompass 0 to 11 Pro-Gly repeating units
PGPGPGPGPGPGPGPGPGPGPGP

SEQ ID NO: 7 - protein, 649 aa, Human papillomavirus
MADDSGTENEGSGCTGWFMVEAIVQHPTGTQISDDEDEEVEDSGYDMVDFIDDSNITHNSLEAQALFNRQEADTHYATVQDLKRKYLGSPYVSPINTIAEAVESEISPRLDAIKLTRQPKKVKRRLFQTRELTDSGYGYSEVEAGTGTQVEKHGVPENGGDGQEKDTGRDIEGEEHTEAEAPTNSVREHAGTAGILELLKCKDLRAALLGKFKECFGLSFIDLIRPFKSDKTTCADWVVAGFGIHHSISEAFQKLIEPLSLYAHIQWLTNAWGMVLLVLVRFKVNKSRSTVARTLATLLNIPDNQMLIEPPKIQSGVAALYWFRTGISNASTVIGEAPEWITRQTVIEHGLADSQFKLTEMVQWAYDNDICEESEIAFEYAQRGDFDSNARAFLNSNMQAKYVKDCATMCRHYKHAEMRKMSIKQWIKHRGSKIEGTGNWKPIVQFLRHQNIEFIPFLSKFKLWLHGTPKKNCIAIVGPPDTGKSYFCMSLISFLGGTVISHVNSSSHFWLQPLVDAKVALLDDATQPCWIYMDTYMRNLLDGNPMSIDRKHKALTLIKCPPLLVTSNIDITKEEKYKYLHTRVTTFTFPNPFPFDRNGNAVYELSNANWKCFFERLSSSLDIQDSEDEEDGSNSQAFRCVPGTVVRTL

SEQ ID NO: 8 - protein, 368 aa, Human papillomavirus
MEAIAKRLDACQEQLLELYEENSTDLNKHVLHWKCMRHESVLLYKAKQMGLSHIGMQVVPPLKVSEAKGHNAIEMQMHLESLLKTEYSMEPWTLQETSYEMWQTPPKRCFKKRGKTVEVKFDGCANNTMDYVVWTDVYVQDTDSWVKVHSMVDAKGIYYTCGQFKTYYVNFVKEAEKYGSTKQWEVCYGSTVICSPASVSSTTQEVSIPESTTYTPAQTSTPVSSSTQEDAVQTPPRKRARGVQQSPCNALCVAHIGPVDSGNHNLITNNHDQHQRRNNSNSSATPIVQFQGESNCLKCFRYRLNDKHRHLFDLISSTWHWASPKAPHKHAIVTVTYHSEEQRQQFLNVVKIPPTIRHKLGFMSLHLL

SEQ ID NO: 9 - protein, 99 aa, Human papillomavirus
MAAQLYVLLHLYLALHKKYPFLNLLHTPPHRPPPLCPQAPRKTQCKRRLENEHEESNSHLATPCVWPTLDPWTVETTTSSLTITTSTKEGTTVTVQLRL

SEQ ID NO: 10 - protein, 91 aa, Human papillomavirus
MEVVPVQIAAGTTSTLILPVIIAFVVCFVSIILIVWISDFIVYTSVLVLTLLLYLLLWLLLTTPLQFFLLTLLVCYCPALYIHHYIVNTQQ

SEQ ID NO: 11 - protein, 150 aa, Human papillomavirus
MESANASTSATTIDQLCKTFNLSMHTLQINCVFCKNALTTAEIYSYAYKQLKVLFRGGYPYAACACCLEFHGKINQYRHFDYAGYATTVEEETKQDILDVLIRCYLCHKPLCEVEKVKHILTKARFIKLNCTWKGRCLHCWTTCMEDMLP

SEQ ID NO: 12 - protein, 98 aa, Human papillomavirus
MHGRHVTLKDIVLDLQPPDPVGLHCYEQLVDSSEDEVDEVDGQDSQPLKQHFQIVTCCCGCDSNVRLVVQCTETDIREVQQLLLGTLDIVCPICAPKT

SEQ ID NO: 13 - protein, 500 aa, Human papillomavirus
MWRPSDSTVYVPPPNPVSKVVATDAYVTRTNIFYHASSSRLLAVGHPYFSIKRANKTVVPKVSGYQYRVFKVVLPDPNKFALPDSSLFDPTTQRLVWACTGLEVGRGQPLGVGVSGHPFLNKYDDVENSGSGGNPGQDNRVNVGMDYKQTQLCMVGCAPPLGEHWGKGKQCTNTPVQAGDCPPLELITSVIQDGDMVDTGFGAMNFADLQTNKSDVPIDICGTTCKYPDYLQMAADPYGDRLFFFLRKEQMFARHFFNRAGEVGEPVPDTLIIKGSGNRTSVGSSIYVNTPSGSLVSSEAQLFNKPYWLQKAQGHNNGICWGNQLFVTVVDTTRSTNMTLCASVTTSSTYTNSDYKEYMRHVEEYDLQFIFQLCSITLSAEVMAYIHTMNPSVLEDWNFGLSPPPNGTLEDTYRYVQSQAITCQKPTPEKEKPDPYKNLSFWEVNLKEKFSSELDQYPLGRKFLLQSGYRGRSSIRTGVKRPAVSKASAAPKRKRAKTKR

SEQ ID NO: 14 - protein, 459 aa, Human papillomavirus
MAHSRARRRKRASATQLYQTCKLTGTCPPDVIPKVEHNTIADQILKWGSLGVFFGGLGIGTGSGTGGRTGYVPLGTSAKPSITSGPMARPPVVVEPVAPSDPSIVSLIEESAIINAGAPEIVPPAHGGFTITSSETTTPAILDVSVTSHTTTSIFRNPVFTEPSVTQPQPPVEANGHILISAPTITSHPIEEIPLDTFVISSSDSGPTSSTPVPGTAPRPRVGLYSRALHQVQVTDPAFLSTPQRLITYDNPVYEGEDVSVQFSHDSIHNAPDEAFMDIIRLHRPAIASRRGLVRYSRIGQRGSMHTRSGKHIGARIHYFYDISPIAQAAEEIEMHPLVAAQDDTFDIYAESFEPDINPTQHPVTNISDTYLTSTPNTVTQPWGNTTVPLSSIPNDLFLQSGPDITFPTAPMGTPFSPVTALPTGPVFITGSGFYLHPAWYFARKRRKRIPLFFSDVAA

SEQ ID NO: 15 - protein, 649 aa, Human papillomavirus
MADDSGTENEGSGCTGWFMVEAIVQHPTGTQISDDEDEEVEDSGYDMVDFIDDSNITHNSLEAQALFNRQEADTHYATVQDLKRKYLGSPYVSPINTIAEAVESEISPRLDAIKLTRQPKKVKRRLFQTRELTDSGYGYSEVEAGTGTQVEKHGVPENGGDGQEKDTGRDIEGEEHTEAEAPTNSVREHAGTAGILELLKCKDLRAALLGKFKECFGLSFIDLIRPFKSDKTTCLDWVVAGFGIHHSISEAFQKLIEPLSLYAHIQWLTNAWGMVLLVLLRFKVNKSRSTVARTLATLLNIPENQMLIEPPKIQSGVAALYWFRTGISNASTVIGEAPEWITRQTVIEHGLADSQFKLTEMVQWAYDNDICEESEIAFEYAQRGDFDSNARAFLNSNMQAKYVKDCATMCRHYKHAEMRKMSIKQWIKHRGSKIEGTGNWKPIVQFLRHQNIEFIPFLTKFKLWLHGTPKKNCIAIVGPPDTGKSYFCMSLISFLGGTVISHVNSSSHFWLQPLVDAKVALLDDATQPCWIYMDTYMRNLLDGNPMSIDRKHKALTLIKCPPLLVTSNIDITKEDKYKYLHTRVTTFTFPNPFPFDRNGNAVYELSNTNWKCFFERLSSSLDIQDSEDEEDGSNSQAFRCVPGTVVRTL

SEQ ID NO: 16 - protein, 368 aa, Human papillomavirus
MEAIAKRLDACQEQLLELYEENSTDLHKHVLHWKCMRHESVLLYKAKQMGLSHIGMQVVPPLKVSEAKGHNAIEMQMHLESLLRTEYSMEPWTLQETSYEMWQTPPKRCFKKRGKTVEVKFDGCANNTMDYVVWTDVYVQDNDTWVKVHSMVDAKGIYYTCGQFKTYYVNFVKEAEKYGSTKHWEVCYGSTVICSPASVSSTTQEVSIPESTTYTPAQTSTLVSSSTKEDAVQTPPRKRARGVQQSPCNALCVAHIGPVDSGNHNLITNNHDQHQRRNNSNSSATPIVQFQGESNCLKCFRYRLNDRHRHLFDLISSTWHWASSKAPHKHAIVTVTYDSEEQRQQFLDVVKIPPTISHKLGFMSLHLL

SEQ ID NO: 17 - protein, 109 aa, Human papillomavirus
MGAPNIGKYVMAAQLYVLLHLYLALHKKYPFLNLLHTPPHRPPPLCPQAPRKTQCKRRLGNEHEESNSPLATPCVWPTLDPWTVETTTSSLTITTSTKDGTTVTVQLRL

SEQ ID NO: 18 - protein, 91 aa, Human papillomavirus
MEVVPVQIAAGTTSTFILPVIIAFVVCFVSIILIVWISEFIVYTSVLVLTLLLYLLLWLLLTTPLQFFLLTLLVCYCPALYIHYYIVTTQQ

SEQ ID NO: 19 - protein, 72 aa, Human papillomavirus
MMLTCQFNDGDTWLGLWLLCAFIVGMLGLLLMHYRAVQGDKHTKCKKCNKHNCNDDYVTMHYTTDGDYIYMN

SEQ ID NO: 20 - protein, 150 aa, Human papillomavirus
MESANASTSATTIDQLCKTFNLSMHTLQINCVFCKNALTTAEIYSYAYKHLKVLFRGGYPYAACACCLEFHGKINQYRHFDYAGYATTVEEETKQDILDVLIRCYLCHKPLCEVEKVKHILTKARFIKLNCTWKGRCLHCWTTCMEDMLP

SEQ ID NO: 21 - protein, 98 aa, Human papillomavirus
MHGRHVTLKDIVLDLQPPDPVGLHCYEQLVDSSEDEVDEVDGQDSQPLKQHFQIVTCCCGCDSNVRLVVQCTETDIREVQQLLLGTLNIVCPICAPKT

SEQ ID NO: 22 - protein, 500 aa, Human papillomavirus; identical to SEQ ID NO: 13

SEQ ID NO: 23 - protein, 459 aa, Human papillomavirus
MAHSRARRRKRASATQLYQTCKLTGTCPPDVIPKVEHNTIADQILKWGSLGVFFGGLGIGTGSGTGGRTGYVPLQTSAKPSITSGPMARPPVVVEPVAPSDPSIVSLIEESAIINAGAPEIVPPAHGGFTITSSETTTPAILDVSVTSHTTTSIFRNPVFTEPSVTQPQPPVEANGHILISAPTVTSHPIEEIPLDTFVVSSSDSGPTSSTPVPGTAPRPRVGLYSRALHQVQVTDPAFLSTPQRLITYDNPVYEGEDVSVQFSHDSIHNAPDEAFMDIIRLHRPAIASRRGLVRYSRIGQRGSMHTRSGKHIGARIHYFYDISPIAQAAEEIEMHPLVAAQDDTFDIYAESFEPGINPTQHPVTNISDTYLTSTPNTVTQPWGNTTVPLSLPNDLFLQSGPDITFPTAPMGTPFSPVTPALPTGPVFITGSGFYLHPAWYFARKRRKRIPLFFSDVAA

SEQ ID NO: 24 - protein, 649 aa, Human papillomavirus
MADDSGTENEGSGCTGWFMVEAIVEHTTGTQISEDEEEEVEDSGYDMVDFIDDRHITQNSVEAQALFNRQEADAHYATVQDLKRKYLGSPYVSPISNVANAVESEISPRLDAIKLTTQPKKVKRRLFETRELTDSGYGYSEVEAATQVEKHGDPENGGDGQERDTGRDIEGEGVEHREAEAVDDSTREHADTSGILELLKCKDIRSTLHGKFKDCFGLSFVDLIRPFKSDRTTCADWVVAGFGIHHSIADAFQKLIEPLSLYAHIQWLTNAWGMVLLVLIRFKVNKSRCTVARTLGTLLNIPENHMLIEPPKIQSGVRALYWFRTGISNASTVIGEAPEWITRQTVIEHSLADSQFKLTEMVQWAYDNDICEESEIAFEYAQRGDFDSNARAFLNSNMQAKYVKDCAIMCRHYKHAEMKKMSIKQWIKYRGTKVDSVGNWKPIVQFLRHQNIEFIPFLSKLKLWLHGTPKKNCIAIVGPPDTGKSCFCMSLIKFLGGTVISYVNSCSHFWLQPLTDAKVALLDDATQPCWTYMDTYMRNLLDGNPMSIDRKHRALTLIKCPPLLVTSNIDISKEEKYKYLHSRVTTFTFPNPFPFDRNGNAVYELSDANWKCFFERLSSSLDIEDSEDEEDGSNSQAFRCVPGSVVRTL

SEQ ID NO: 25 - protein, 367 aa, Human papillomavirus
MEAIAKRLDACQDQLLELYEENSIDIHKHIMHWKCIRLESVLLHKAKQMGLSHIGLQVVPPLTVSETKGHNAIEMQMHLESLAKTQYGVEPWTLQDTSYEMWLTPPKRCFKKQGNTVEVKFDGCEDNVMEYVVWTHIYLQDNDSWVKVTSSVDAKGIYYTCGQFKTYYVNFNKEAQKYGSTNHWEVCYGSTVICSPASVSSTVREVSIAEPTTYTPAQTTAPTVSACTTEDGVSAPPRKRARGPSTNNTLCVANIRSVDSTINNIVTDNYNKHQRRNNCHSAATPIVQLQGDSNCLKCFRYRLNDKYKHLFELASSTWHWASPEAPHKNAIVTLTYSSEEQRQQFLNSVKIPPTIRHKVGFMSLHLL

SEQ ID NO: 26 - protein, 108 aa, Human papillomavirus
MVVPIIGKYVMAAQLYVLLHLYLALYEKYPLLNLLHTPPHRPPPLQCPPAPRKTACRRRLGSEHVDRPLTTPCVWPTSDPWTVQSTTSSLTITTSTKEGTTVTVQLRL

SEQ ID NO: 27 - protein, 91 aa, Human papillomavirus
MEVVPVQIAAATTTTLILPVVIAFAVCILSIVLIILISDFVVYTSVLVLTLLLYLLLWLLLTTPLQFFLLTLCVCYFPAFYIHIYIVQTQQ

SEQ ID NO: 28 - protein, 74 aa, Human papillomavirus
MVMLTCHLNDGDTWLFLWLFTAFVVAVLGLLLLHYRAVHGTEKTKCAKCKSNRNTTVDYVYMSHGDNGDYVYMN

SEQ ID NO: 29 - protein, 150 aa, Human papillomavirus
MESKDASTSATSIDQLCKTFNLSLHTLQIQCVFCRNALTTAEIYAYAYKNLKVVWRDNFPFAACACCLELQGKINQYRHFNYAAYAPTVEEETNEDILKVLIRCYLCHKPLCEIEKLKHILGKARFIKLNNQWKGRCLHCWTTCMEDLLP

SEQ ID NO: 30 - protein, 98 aa, Human papillomavirus
MHGRLVTLKDIVLDLQPPDPVGLHCYEQLEDSSEDEVDKVDKQDAQPLTQHYQILTCCCGCDSNVRLVVECTDGDIRQLQDLLLGTLNIVCPICAPKP

SEQ ID NO: 31 - protein, 501 aa, Human papillomavirus
MWRPSDSTVYVPPPNPVSKVVATDAYVKRTNIFYHASSSRLLAVGHPYYSIKKVNKTVVPKVSGYQYRVFKVVLPDPNKFALPDSSLFDPTTQRLVWACTGLEVGRGQPLGVGVSGHPLLNKYDDVENSGGYGGNPGQDNRVNVGMDYKQTQLCMVGCAPPLGEHWGKGTQCSNTSVQNGDCPPLELITSVIQDGDMVDTGFGAMNFADLQTNKSDVPLDICGTVCKYPDYLQMAADPYGDRLFFYLRKEQMFARHFFNRAGTVGEPVPDDLLVKGGNNRSSVASSIYVHTPSGSLVSSEAQLFNKPYWLQKAQGHNNGICWGNHLFVTVVDTTRSTNMTLCASVSKSATYTNSDYKEYMRHVEEFDLQFIFQLCSITLSAEVMAYIHTMNPSVLEDWNFGLSPPPNGTLEDTYRYVQSQAITCQKPTPEKEKQDPYKDMSFWEVNLKEKFSSELDQFPLGRKFLLQSGYRGRTSARTGIKRPAVSKPSTAPKRKRTKTKK

SEQ ID NO: 32 - protein, 455 aa, Human papillomavirus
MKPRARRRKRASATQLYQTCKATGTCPPDVIPKVEHTTIADQILKWGSLGVFFGGLGIGTGAGSGGRAGYIPLGSSPKPAITGGPAARPPVLVEPVAPSDPSIVSLIEESAIINAGAPEVVPPTQGGFTITSSESTTPAILDVSVTNHTTTSVFQNPLFTEPSVIQPQPPVEASGHILISAPTITSQHVEDIPLDTFVVSSSDSGPTSSTPLPRAFPRPRVGLYSRALQQVQVTDPAFLSTPQRLVTYDNPVYEGEDVSLQFTHESIHNAPDEAFMDIIRLHRPAITSRRGLVRFSRIGQRGSMYTRSGQHIGARIHYFQDISPVTQAAEEIELHPLVAAENDTFDIYAEPFDPIPDPVQHSVTQSYLTSTPNTLSQSWGNTTVPLSIPSDWFVQSGPDITFPTASMGTPFSPVTPALPTGPVFITGSDFYLHPTWYFARRRRKRIPLFFTDVAA

SEQ ID NO: 33 - protein, 649 aa, Human papillomavirus
MADPAGTNGEEGTGCNGWFYVEAVVEKKTGDAISDDENENDSDTGEDLVDFIVNDNDYLTQAETETAHALFTAQEAKQHRDAVQVLKRKYLVSPLSDISGCVDNNISPRLKAICIEKQSRAAKRRLFESEDSGYGNTEVETQQMLQVEGRHETETPCSQYSGGSGGGCSQYSSGSGGEGVSERHTICQTPLTNILNVLKTSNAKAAMLAKFKELYGVSFSELVRPFKSNKSTCCDWCIAAFGLTPSIADSIKTLLQQYCLYLHIQSLACSWGMVVLLLVRYKCGKNRETIEKLLSKLLCVSPMCMMIEPPKLRSTAAALYWYKTGISNISEVYGDTPEWIQRQTVLQHSFNDCTFELSQMVQWAYDNDIVDDSEIAYKYAQLADTNSNASAFLKSNSQAKIVKDCATMCRHYKRAEKKQMSMSQWIKYRCDRVDDGGDWKQIVMFLRYQGVEFMSFLTALKRFLQGIPKKNCILLYGAANTGKSLFGMSLMKFLQGSVICFVNSKSHFWLQPLADAKIGMLDDATVPCWNYIDDNLRNALDGNLVSMDVKHRPLVQLKCPPLLITSNINAGTDSRWPYLHNRLVVFTFPNEFPFDENGNPVYELNDKNWKSFFSRTWSRLSLHEDEDKENDGDSLPTFKCVSGQNTNTL

SEQ ID NO: 34 - protein, 365 aa, Human papillomavirus
METLCQRLNVCQDKILTHYENDSTDLRDHIDYWKHMRLECAIYYKAREMGFKHINHQVVPTLAVSKNKALQAIELQLTLETIYNSQYSNEKWTLQDVSLEVYLTAPTGCIKKHGYTVEVQFDGDICNTMHYTNWTHIYICEEASVTVVEGQVDYYGLYYVHEGIRTYFVQFKDDAEKYSKNKVWEVHAGGQVILCPTSVFSSNEVSSPEIIRQHLANHPAATHTKAVALGTEETQTTIQRPRSEPDTGNPCHTTKLLHRDSVDSAPILTAFNSSHKGRINCNSNTTPIVHLKGDANTLKCLRYRFKKHCTLYTAVSSTWHWTGHNVKHKSAIVTLTYDSEWQRDQFLSQVKIPKTITVSTGFMSI

SEQ ID NO: 35 - protein, 83 aa, Human papillomavirus
MTNLDTASTTLLACFLLCFCVLLCVCLLIRPLLLSVSTYTSLIILVLLLWITAASAFRCFIVYIIFVYIPLFLIHTHARFLIT

SEQ ID NO: 36 - protein, 158 aa, Human papillomavirus
MHQKRTAMFQDPQERPRKLPQLCTELQTTIHDIILECVYCKQQLLRREVYDFAFRDLCIVYRDGNPYAVCDKCLKFYSKISEYRHYCYSLYGTTLEQQYNKPLCDLLIRCINCQKPLCPEEKQRHLDKKQRFHNIRGRWTGRCMSCCRSSRTRRETQL

SEQ ID NO: 37 - protein, 98 aa, Human papillomavirus
MHGDTPTLHEYMLDLQPETTDLYCYEQLNDSSEEEDEIDGPAGQAEPDRAHYNIVTFCCKCDSTLRLCVQSTHVDIRTLEDLLMGTLGIVCPICSQKP

SEQ ID NO: 38 - protein, 531 aa, Human papillomavirus
MQVTFIYILVITCYENDVNVYHIFFQMSLWLPSEATVYLPPVPVSKVVSTDEYVARTNIYYHAGTSRLLAVGHPYFPIKKPNNNKILVPKVSGLQYRVFRIHLPDPNKFGFPDTSFYNPDTQRLVWACVGVEVGRGQPLGVGISGHPLLNKLDDTENASAYAANAGVDNRECISMDYKQTQLCLIGCKPPIGEHWGKGSPCTNVAVNPGDCPPLELINTVIQDGDMVDTGFGAMDFTTLQANKSEVPLDICTSICKYPDYIKMVSEPYGDSLFFYLRREQMFVRHLFNRAGAVGENVPDDLYIKGSGSTANLASSNYFPTPSGSMVTSDAQIFNKPYWLQRAQGHNNGICWGNQLFVTVVDTTRSTNMSLCAAISTSETTYKNTNFKEYLRHGEEYDLQFIFQLCKITLTADVMTYIHSMNSTILEDWNFGLQPPPGGTLEDTYRFVTSQAIACQKHTPPAPKEDPLKKYTFWEVNLKEKFSADLDQFPLGRKFLLQAGLKAKPKFTLGKRKATPTTSSTSTTAKRKKRKL

SEQ ID NO: 39 - protein, 473 aa, Human papillomavirus
MRHKRSAKRTKRASATQLYKTCKQAGTCPPDIIPKVEGKTIADQILQYGSMGVFFGGLGIGTGSGTGGRTGYIPLGTRPPTATDTLAPVRPPLTVDPVGPSDPSIVSLVEETSFIDAGAPTSVPSIPPDVSGFSITTSTDTTPAILDINNTVTTVTTHNNPTFTDPSVLQPPTPAETGGHFTLSSSTISTHNYEEIPMDTFIVSTNPNTVTSSTPIPGSRPVARLGLYSRTTQQVKVVDPAFITTPTKLITYDNPAYEGIDVDNTLYFSSNDNSINIAPDPDFLDIVALHRPALTSRRTGIRYSRIGNKQTLRTRSGKSIGAKVHYYYDFSTIDSAEEIELQTITPSTYTTTSHAALPTSINNGLYDIYADDFITDTSTTPVPSVPSTSLSGYIPANTTIPFGGAYNIPLVSGPDIPINITDQAPSLIPIVPGSPQYTIIADAGDFYLHPSYYMLRKRRKRLPYFFSDVSLAA

SEQ ID NO: 40 - protein, 657 aa, Human papillomavirus
MADPEGTDGEGTGCNGWFYVQAIVDKKTGDVISDDEDENATDTGSDMVDFIDTQGTFCEQAELETAQALFHAQEVHNDAQVLHVLKRKFAGGSTENSPLGERLEVDTELSPRLQEISLNSGQKKAKRRLFTISDSGYGCSEVEATQIQVTTNGEHGGNVCSGGSTEAIDNGGTEGNNSSVDGTSDNSNIENVNPQCTIAQLKDLLKVNNKQGAMLAVFKDTYGLSFTDLVRNFKSDKTTCTDWVTAIFGVNPTIAEGFKTLIQPFILYAHIQCLDCKWGVLILALLRYKCGKSRLTVAKGLSTLLHVPETCMLIQPPKLRSSVAALYWYRTGISNISEVMGDTPEWIQRLTIIQHGIDDSNFDLSEMVQWAFDNELTDESDMAFEYALLADSNSNAAAFLKSNCQAKYLKDCATMCKHYRRAQKRQMNMSQWIRFRCSKIDEGGDWRPIVQFLRYQQIEFITFLGALKSFLKGTPKKNCLVFCGPANTGKSYFGMSFIHFIQGAVISFVNSTSHFWLEPLTDTKVAMLDDATTTCWTYFDTYMRNALDGNPISIDRKHKPLIQLKCPPILLTTNIHPAKDNRWPYLESRITVFEFPNAFPFDKNGNPVYEINDKNWKCFFERTWSRLDLHEEEEDADTEGNPFGTFKLRAGQNHRPL

SEQ ID NO: 41 - protein, 365 aa, Human papillomavirus
MQTPKETLSERLSCVQDKIIDHYENDSKDIDSQIQYWQLIRWENAIFFAAREHGIQTLNHQVVPAYNISKSKAHKAIELQMALQGLAQSRYKTEDWTLQDTCEELWNTEPTHCFKKGGQTVQVYFDGNKDNCMTYVAWDSVYYMTDAGTWDKTATCVSHRGLYYVKEGYNTFYIEFKSECEKYGNTGTWEVHFGNNVIDCNDSMCSTSDDTVSATQLVKQLQHTPSPYSSTVSVGTAKTYGQTSAATRPGHCGLAEKQHCGPVNPLLGAATPTGNNKRRKLCSGNTTPIIHLKGDRNSLKCLRYRLRKHSDHYRDISSTWHWTGAGNEKTGILTVTYHSETQRTKFLNTVAIPDSVQILVGYMTM

SEQ ID NO: 42 - protein, 73 aa, Human papillomavirus
MLSLIFLFCFCVCMYVCCHVPLLPSVCMCAYAWVLVFVYIVVITSPATAFTVYVFCFLLPMLLLHIHAILSLQ

SEQ ID NO: 43 - protein, 158 aa, Human papillomavirus
MARFEDPTRRPYKLPDLCTELNTSLQDIEITCVYCKTVLELTEVFEFAFKDLFVVYRDSIPHAACHKCIDFYSRIRELRHYSDSVYGDTLEKLTNTGLYNLLIRCLRCQKPLNPAEKLRHLNEKRRFHNIAGHYRGQCHSCCNRARQERLQRRRETQV

SEQ ID NO: 44 - protein, 105 aa, Human papillomavirus
MHGPKATLQDIVLHLEPQNEIPVDLLCHEQLSDSEEENDEIDGVNHQHLPARRAEPQRHTMLCMCCKCEARIKLVVESSADDLRAFQQLFLNTLSFVCPWCASQQ

SEQ ID NO: 45 - protein, 568 aa, Human papillomavirus
MCLYTRVLILHYHLLPLYGPLYHPRPLPLHSILVYMVHIIICGHYIILFLRNVNVFPIFLQMALWRPSDNTVYLPPPSVARVVNTDDYVTPTSIFYHAGSSRLLTVGNPYFRVPAGGGNKQDIPKVSAYQYRVFRVQLPDPNKFGLPDTSIYNPETQRLVWACAGVEIGRGQPLGVGLSGHPFYNKLDDTESSHAATSNVSEDVRDNVSVDYKQTQLCILGCAPAIGEHWAKGTACKSRPLSQGDCPPLELKNTVLEDGDMVDTGYGAMDFSTLQDTKCEVPLDICQSICKYPDYLQMSADPYGDSMFFCLRREQLFARHFWNRAGTMGDTVPQSLYIKGTGMPASPGSCVYSPSPSGSIVTSDSQLFNKPYWLHKAQGHNNGVCWHNQLFVTVVDTTPSTNLTICASTQSPVPGQYDATKFKQYSRHVEEYDLQFIFQLCTITLTADVMSYIHSMNSSILEDWNFGVPPPPTTSLVDTYRFVQSVAITCQKDAAPAENKDPYDKLKFWNVDLKEKFSLDLDQYPLGRKFLVQAGLRRKPTIGPRKRSAPSATTSSKPAKRVRVRARK

SEQ ID NO: 46 - protein, 462 aa, Human papillomavirus
MVSHRAARRKRASVTDLYKTCKQSGTCPPDVVPKVEGTTLADKILQWSSLGIFLGGLGIGTGSGTGGRTGYIPLGGRSNTVVDVGPTRPPVVIEPVGPTDPSIVTLIEDSSVVTSGAPRPTFTGTSGFDITSAGTTTPAVLDITPSSTSVSISTTNFTNPAFSDPSIIEVPQTGEVAGNVFVGTPTSGTHGYEEIPLQTFASSGTGEEPISSTPLPTVRRVAGPRLYSRAYQQVSVANPEFLTRPSSLITYDNPAFEPVDTTLTFDPRSDVPDSDFMDIIRLHRPALTSRRGTVRFSRLGQRATMFTRSGTQIGARVHFYHDISPIAPSPEYIELQPLVSATEDNDLFDIYADDMDPAVPVPSRSTTSFAFFKYSPTISSASSYSNVTVPLTSSWDVPVYTGPDITLPSTTSVWPIVSPTAPASTQYIGIHGTHYYLWPLYYFIPKKRKRVPYFFADGFVAA

SEQ ID NO: 47 - protein, 629 aa, Human papillomavirus
MADPAGTDGEGTGCNGWFYVEAVIDRQTGDNISEDENEDSSDTGEDMVDFIDNCNVYNNQAEAETAQALFHAQEAEEHAEAVQVLKRKYVGSPLSDISSCVDYNISPRLKAICIENNSKTAKRRLFELPDSGYGNTEVETQQMVQVEEQQTTLSCNGSDGTHSERENETPTRNILQVLKTSNGKAAMLGKFKELYGVSFMELIRPFQSNKSTCTDWCVAAFGVTGTVAEGFKTLLQPYCLYCHLQSLACSWGMVMLMLVRFKCAKNRITIEKLLEKLLCISTNCMLIQPPKLRSTAAALYWYRTGMSNISDVYGETPEWIERQTVLQHSFNDTTFDLSQMVQWAYDNDVMDDSEIAYKYAQLADSDSNACAFLKSNSQAKIVKDCGTMCRHYKRAEKRQMSMGQWIKSRCDKVSDEGDWRDIVKFLRYQQIEFVSFLSALKLFLKGVPKKNCILIHGAPNTGKSYFGMSLISFLQGCIISYANSKSHFWLQPLADAKIGMLDDATTPCWHYIDNYLRNALDGNPVSIDVKHKALMQLKCPPLLITSNINAGKDDRWPYLHSRLVVFTFPNPFPFDKNGNPVYELSDKNWKSFFSRTWCRLNLHEEEDKENDGDSFSTFKCVSGQNIRTL

SEQ ID NO: 48 - protein, 372 aa, Human papillomavirus
METLSQRLNVCQDKILEHYENDSKRLCDHIDYWKHIRLECVLMYKAREMGIHSINHQVVPALSVSKAKALQAIELQMMLETLNNTEYKNEDWTMQQTSLELYLTAPTGCLKKHGYTVEVQFDGDVHNTMHYTNWKFIYLCIDGQCTVVEGQVNCKGIYYVHEGHITYFVNFTEEAKKYGTGKKWEVHAGGQVIVFPESVFSSDEISFAGIVTKLPTANNTTTSNSKTCALGTSEGVRRATTSTKRPRTEPEHRNTHHPNKLLRGDSVDSVNCGVISAAACTNQTRAVSCPATTPIIHLKGDANILKCLRYRLSKYKQLYEQVSSTWHWTCTDGKHKNAIVTLTYISTSQRDDFLNTVKIPNTVSVSTGYMTI

SEQ ID NO: 49 - protein, 84 aa, Human papillomavirus
MIELNISTVSIVLCFLLCFCVLLFVCLVIRPLVLSVSVYATLLLLIVILWVIATSPLRCFCIYVVFIYIPLFVIHTHASFLSQQ

SEQ ID NO: 50 - protein, 149 aa, Human papillomavirus
MFKNPAERPRKLHELSSALEIPYDELRLNCVYCKGQLTETEVLDFAFTDLTIVYRDDTPHGVCTKCLRFYSKVSEFRWYRYSVYGTTLEKLTNKGICDLLIRCITCQRPLCPEEKQRHLDKKKRFHNIGGRWTGRCIACWRRPRTETQV

SEQ ID NO: 51 - protein, 98 aa, Human papillomavirus
MRGETPTLQDYVLDLQPEATDLHCYEQLPDSSDEEDVIDSPAGQAEPDTSNYNIVTFCCQCKSTLRLCVQSTQVDIRILQELLMGSFGIVCPNCSTRL

SEQ ID NO: 52 - protein, 504 aa, Human papillomavirus
MSLWRPSEATVYLPPVPVSKVVSTDEYVTRTNIYYHAGSARLLTVGHPYYSIPKSDNPKKIVVPKVSGLQYRVFRVRLPDPNKFGFPDTSFYNPETQRLVWACVGLEVGRGQPLGVGISGHPLLNKFDDTENSNRYAGGPGTDNRECISMDYKQTQLCLLGCKPPIGEHWGKGSPCSNNAITPGDCPPLELKNSVIQDGDMVDTGFGAMDFTALQDTKSNVPLDICNSICKYPDYLKMVAEPYGDTLFFYLRREQMFVRHFFNRSGTVGESVPTDLYIKGSGSTATLANSTYFPTPSGSMVTSDAQIFNKPYWMQRAQGHNNGICWGNQLFVTVVDTTRSTNMSVCAAIANSDTTFKSSNFKEYLRHGEEFDLQFIFQLCKITLSADIMTYIHSMNPAILEDWNFGLTTPPSGSLEDTYRFVTSQAITCQKTAPQKPKEDPFKDYVFWEVNLKEKFSADLDQFPLGRKFLLQAGYRARPKFKAGKRSAPSASTTTPAKRKKTKK

SEQ ID NO: 53 - protein, 466 aa, Human papillomavirus
MRSKRSTKRTKRASATQLYQTCKAAGTCPSDVIPKIEHTTIADQILRYGSMGVFFGGLGIGSGSGTGGRTGYVPLSTRPSTVSEASIPIRPPVSIDPVGPLDPSIVSLVEESGIVDVGAPAPIPHPPTTSGFDIATTADTTPAILDVTSVSTHENPTFTDPSVLQPPTPAETSGHLLLSSSSISTHNYEEIPMDTFIVSTNNENITSSTPIPGVRRPARLGLYSKATQQVKVIDPTFLSAPKQLITYENPAYETVNAEESLYFSNTSHNIAPDPDFLDIIALHRPALTSRRNTVRYSRLGNKQTLRTRSGATIGARVHYYYDISSINPAGESIEMQPLGASATTTSTLNDGLYDIYADTDFTVDTPATHNVSPSTAVQSTSAVSAYVPTNTTVPLSTGFDIPIFSGPDVPIEHAPTQVFPFPLAPTTPQVSIFVDGGDFYLHPSYYMLKRRRKRVSYFFTDVSVAA

SEQ ID NO: 54 - protein, 644 aa, Human papillomavirus
MADPEGTNGAGMGCTGWFEVEAVIERRTGDNISEDEDETADDSGTDLLEFIDDSMENSIQADTEAARALFNIQEGEDDLNAVCALKRKFAACSQSAAEDVVDRAANPCRTSINKNKECTYRKRKIDELEDSGYGNTEVETQQMVQQVESQNGDTNLNDLESSGVGDDSEVSCETNVDSCENVTLQEISNVLHSSNTKANILYKFKEAYGISFMELVRPFKSDKTSCTDWCITGYGISPSVAESLKVLIKQHSLYTHLQCLTCDRGIIILLLIRFRCSKNRLTVAKLMSNLLSIPETCMVIEPPKLRSQTCALYWFRTAMSNISDVQGTTPEWIDRLTVLQHSFNDNIFDLSEMVQWAYDNELTDDSDIAYYYAQLADSNSNAAAFLKSNSQAKIVKDCGIMCRHYKKAEKRKMSIGQWIQSRCEKTNDGGNWRPIVQLLRYQNIEFTAFLGAFKKFLKGIPKKSCMLICGPANTGKSYFGMSLIQFLKGCVISCVNSKSHFWLQPLSDAKIGMIDDVTPISWTYIDDYMRNALDGNEISIDVKHRALVQLKCPPLLLTSNTNAGTDSRWPYLHSRLTVFEFKNPFPFDENGNPVYAINDENWKSFFSRTWCKLDLIEEEDKENHGGNISTFKCSAGENTRSLRS

SEQ ID NO: 55 - protein, 353 aa, Human papillomavirus
MEEISARLNAVQEKILDLYEADKTDLPSQIEHWKLIRMECALLYTAKQMGFSHLCHQVVPSLLASKTKAFQVIELQMALETLSKSQYSTSQWTLQQTSLEVWLCEPPKCFKKQGETVTVQYDNDKKNTMDYTNWGEIYIIEEDTCTMVTGKVDYIGMYYIHNCEKVYFKYFKEDAAKYSKTQMWEVHVGGQVIVCPTSISSNQISTTETADIQTDNDNRPPQAAAKRRRPADTTDTAQPLTKLFCADPALDNRTARTATNCTNKQRTVCSSNVAPIVHLKGESNSLKCLRYRLKPYKELYSSMSSTWHWTSDNKNSKNGIVTVTFVTEQQQQMFLGTVKIPPTVQISTGFMTL

SEQ ID NO: 56 - protein, 75 aa, Human papillomavirus
MIFVFVLCFILFLCLSLLLRPLILSISTYAWLLVLVLLLWVFVGSPLKIFFCYLLFLYLPMMCINFHAQHMTQQE

SEQ ID NO: 57 - protein, 149 aa, Human papillomavirus
MFQDTEEKPRTLHDLCQALETTIHNIELQCVECKKPLQRSEVYDFAFADLTVVYREGNPFGICKLCLRFLSKISEYRHYNYSVYGNTLEQTVKKPLNEILIRCIICQRPLCPQEKKRHVDLNKRFHNISGRWAGRCAACWRSRRRETAL

SEQ ID NO: 58 - protein, 97 aa, Human papillomavirus
MRGHKPTLKEYVLDLYPEPTDLYCYEQLSDSSDEDEGLDRPDGQAQPATADYYIVTCCHTCNTTVRLCVNSTASDLRTIQQLLMGTVNIVCPTCAQQ

SEQ ID NO: 59 - protein, 499 aa, Human papillomavirus
MSVWRPSEATVYLPPVPVSKVVSTDEYVSRTSIYYYAGSSRLLAVGHPYFSIKNPTNAKKLLVPKVSGLQYRVFRVRLPDPNKFGFPDTSFYNPDTQRLVWACVGLEIGRGQPLGVGISGHPLLNKFDDTETGNKYPGQPGADNRECLSMDYKQTQLCLLGCKPPTGEHWGKGVACTNAAPANDCPPLELINTIIEDGDMVDTGFGCMDFKTLQANKSDVPIDICGSTCKYPDYLKMTSEPYGDSLFFFLRREQMFVRHFFNRAGTLGEAVPDDLYIKGSGTTASIQSSAFFPTPSGSMVTSESQLFNKPYWLQRAQGHNNGICWGNQVFVTVVDTTRSTNMTLCTQVTSDSTYKNENFKEYIRHVEEYDLQFVFQLCKVTLTAEVMTYIHAMNPDILEDWQFGLTPPPSASLQDTYRFVTSQAITCQKTVPPKEKEDPLGKYTFWEVDLKEKFSADLDQFPLGRKFLLQAGLKAKPKLKRAAPTSTRTSSAKRKKVKK

SEQ ID NO: 60 - protein, 467 aa, Human papillomavirus
MRHKRSTRRKRASATQLYQTCKATGTCPPDVIPKVEGSTIADQILKYGSLGVFFGGLGIGTGSGSGGRTGYVPIGTDPPTAAIPLQPIRPPVTVDTVGPLDSSIVSLIEETSFIEAGAPAPSIPTPSGFDVTTSADTTPAIINVSSVGESSIQTISTHLNPTFTEPSVLHPPAPAEASGHFIFSSPTVSTQSYENIPMDTFVVSTDSSNVTSSTPIPGSRPVARLGLYSRNTQQVKVVDPAFLTSPHKLITYDNPAFESFDPEDTLQFQHSDISPAPDPDFLDIIALHRPAITSRRHTVRFSRVGQKATLKTRSGKQIGARIHYYQDLSPIVPLDHTVPNEQYELQPLHDTSTSSYSINDGLYDVYADDVDNVHTPMQHSYSTFATTRTSNVSIPLNTGFDTPVMSGPDIPSPLFPTSSPFVPISPFFPFDTIVVDGADFVLHPSYFILRRRRKRFPYFFTDVRVAA

SEQ ID NO: 61 - protein, 643 aa, Human papillomavirus
MADPEGTDGEGTGCNGWFFVETIVEKKTGDVISDDEDETATDTGSDMVDFIDTQLSICEQAEQETAQALFHAQEVQNDAQVLHLLKRKFAGGSKENSPLGEQLSVDTDLSPRLQEISLNSGHKKAKRRLFTISDSGYGCSEVEAAETQVTVNTNAENGGSVHSTQSSGGDSSDNAENVDPHCSITELKELLQASNKKAAMLAVFKDIYGLSFTDLVRNFKSDKTTCTDWVMAIFGVNPTVAEGFKTLIKPATLYAHIQCLDCKWGVLILALLRYKCGKNRLTVAKGLSTLLHVPETCMLIEPPKLRSSVAALYWYRTGISNISEVSGDTPEWIQRLTIIQHGIDDSNFDLSDMVQWAFDNDLTDESDMAFQYAQLADCNSNAAAFLKSNCQAKYLKDCAVMCRHYKRAQKRQMNMSQWIKYRCSKIDEGGDWRPIVQFLRYQGVEFISFLRALKEFLKGTPKKNCILLYGPANTGKSYFGMSFIHFLQGAIISFVNSNSHFWLEPLADTKVAMLDDATHTCWTYFDNYMRNALDGNPISIDRKHKPLLQLKCPPILLTSNIDPAKDNKWPYLESRVTVFTFPHAFPFDKNGNPVYEINDKNWKCFFERTWSRLDLHEDDEDADTEGIPFGTFKCVTGQNTRPL

SEQ ID NO: 62 - protein, 368 aa, Human papillomavirus
MKMQTPKESLSERLSALQDKILDHYENDSKDINSQISYWQLIRLENAILFTAREHGITKLNHQVVPPINISKSKAHKAIELQMALKGLAQSKYNNEEWTLQDTCEELWNTEPSQCFKKGGKTVHVYFDGNKDNCMNYVVWDSIYYITETGIWDKTAACVSYWGVYYIKDGDTTYYVQFKSECEKYGNSNTWEVQYGGNVIDCNDSMCSTSDDTVSATQIVRQLQHASTSTPKTASVGTPKPHIQTPATKRPRQCGLTEQHHGRVNTHVHNPLLCSSTSNNKRRKVCSGNTTPIIHLKGDKNSLKCLRYRLRKYADHYSEISSTWHWTGCNKNTGILTVTYNSEVQRNTFLDVVTIPNSVQISVGYMTI

SEQ ID NO: 63 - protein, 158 aa, Human papillomavirus
MARFDDPTQRPYKLPDLCTELNTSLQDVSIACVYCKATLERTEVYQFAFKDLFIVYRDCIAYAACHKCIDFYSRIRELRYYSNSVYGETLEKITNTELYNLLIRCLRCQKPLNPAEKRRHLKDKRRFHSIAGQYRGQCNTCCDQARQERLRRRRETQV

SEQ ID NO: 64 - protein, 106 aa, Human papillomavirus
MHGPRATLQEIVLHLEPQNELDPVDLLCYEQLSESEEENDEADGVSHAQLPARRAEPQRHKILCVCCKCDGRIELTVESSADDLRTLQQLFLSTLSFVCPWCATNQ

SEQ ID NO: 65 - protein, 536 aa, Human papillomavirus
MAHNIIYGHGIIIFLKNVNVFPIFLQMALWRPSDSTVYLPPPSVARVVNTDDYVSRTSIFYHAGSSRLLTVGNPYFRVVPSGAGNKQAVPKVSAYQYRVFRVALPDPNKFGLPDSTIYNPETQRLVWACVGMEIGRGQPLGIGLSGHPFYNKLDDTESAHAATAVITQDVRDNVSVDYKQTQLCILGCVPAIGEHWAKGTLCKPAQLQPGDCPPLELKNTIIEDGDMVDTGYGAMDFSTLQDTKCEVPLDICQSICKYPDYLQMSADPYGDSMFFCLRREQLFARHFWNRAGVMGDTVPTDLYIKGTSANMRETPGSCVYSPSPSGSITTSDSQLFNKPYWLHKAQGHNNGICWHNQLFVTVVDTTRSTNLTLCASTQNPVPNTYDPTKFKHYSRHVEEYDLQFIFQLCTITLTAEVMSYIHSMNSSILENWNFGVPPPPTTSLVDTYRFVQSVAVTCQKDTTPPEKQDPYDKLKFWTVDLKEKFSSDLDQYPLGRKFLVQAGLRRRPTIGPRKRPAASTSTASRPAKRVRIRSKK

SEQ ID NO: 66 - protein, 463 aa, Human papillomavirus
MVSHRAARRKRASATDLYRTCKQSGTCPPDVINKVEGTTLADKILQWSSLGIFLGGLGIGTGSGSGGRTGYVPLGGRSNTVVDVGPTRPPVVIEPVGPTDPSIVTLVEDSSVVASGAPVPTFTGTSGFEITSSGTTTPAVLDITPTVDSVSISSTSFTNPAFSDPSIIEVPQTGEVSGNIFVGTPTSGSHGYEEIPLQTFASSGSGTEPISSTPLPTVRRVRGPRLYSRANQQVRVSTSQFLTHPSSLVTFDNPAYEPLDTTLSFEPTSNVPDSDFMDIIRLHRPALSSRRGTVRFSRLGQRATMFTRSGKQIGGRVHFYHDISPIAATEEIELQPLISATNDSDLFDVYADFPPPASTTPSTIHKSFTYPKYSLTMPSTAASSYSNVTVPLTSAWDVPIYTGPDIILPSHTPMWPSTSPTNASTTTYIGIHGTQYYLWPWYYYFPKKRKRIPYFFADGFVAA

SEQ ID NO: 67 - protein, 647 aa, Human papillomavirus
MEDPEGTEGEREGCTGWFEVEAIIEKQTGDNISEDEDENAYDSGTDLIDFIDDSNINNEQAEHEAARALFNAQEGEDDLHAVSAVKRKFTSSPESAGQDGVEKHGSPRAKHICVNTECVLPKRKPCHVEDSGYGNSEVEAQQMADQVDGQNGDWQSNSSQSSGVGASNSDVSCTSIEDNEENSNRTLKSIQNIMCENSIKTTVLFKFKETYGVSFMELVRPFKSNRSSCTDWCIIGMGVTPSVAEGLKVLIQPYSIYAHLQCLTCDRGVLILLLIRFKCGKNRLTVSKLMSQLLNIPETHMVIEPPKLRSATCALYWYRTGLSNISEVYGTTPEWIEQQTVLQHSFDNSIFDFGEMVQWAYDHDITDDSDIAYKYAQLADVNSNAAAFLKSNSQAKIVKDCATMCRHYKRAERKHMNIGQWIQYRCDRIDDGGDWRPIVRFLRYQDIEFTAFLDAFKKFLKGIPKKNCLVLYGPANTGKSYFGMSLIRFLSGCVISYVNSKSHFWLQPLTDAKVGMIDDVTPICWTYIDDYMRNALDGNDISVDVKHRALVQIKCPPLILTTNTNAGTDPRWPYLHSRLVVFHFKNPFPFDENGNPIYEINNENWKSFFSRTWCKLDLIQEEDKENDGVDTGTFKCSAGKNTRSIRS

SEQ ID NO: 68 - protein, 368 aa, Human papillomavirus
MESIPARLNAVQEKILDLYEADSNDLNAQIEHWKLTRMECVLFYKAKELGITHIGHQVVPPMAVSKAKACQAIELQLALEALNKTQYSTDGWTLQQTSLEMWRAEPQKYFKKHGYTITVQYDNDKNNTMDYTNWKEIYLLGECECTIVEGQVDYYGLYYWCDGEKIYFVKFSNDAKQYCVTGVWEVHVGGQVIVCPASVSSNEVSTTETAVHLCTETSKTSAVSVGAKDTHLQPPQKRRRPDVTDSRNTKYPNNLLRGQQSVDSTTRGLVTATECTNKGRVAHTTCTAPIIHLKGDPNSLKCLRYRVKTHKSLYVQISSTWHWTSNECTNNKLGIVTITYSDETQRQQFLKTVKIPNTVQVIQGVMSL

SEQ ID NO: 69 - protein, 148 aa, Human papillomavirus
MFEDPATRPRTLHELCEVLEESVHEIRLQCVQCKKELQRREVYKFLFTDLRIVYRDNNPYGVCIMCLRFLSKISEYRHYQYSLYGKTLEERVKKPLSEITIRCIICQTPLCPEEKERHVNANKRFHNIMGRWTGRCSECWRPRPVTQV

SEQ ID NO: 70 - protein, 99 aa, Human papillomavirus
MRGDKATIKDYILDLQPETTDLHCYEQLGDSSDEEDTDGVDRPDGQAEQATSNYYIVTYCHSCDSTLRLCIHSTATDLRTLQQMLLGTLQVVCPGCARL

SEQ ID NO: 71 - protein, 529 aa, Human papillomavirus
MVQILFYILVIFYYVAGVNVFHIFLQMSVWRPSEATVYLPPVPVSKVVSTDEYVSRTSIYYYAGSSRLLTVGHPYFSIKNTSSGNGKKVLVPKVSGLQYRVFRIKLPDPNKFGFPDTSFYNPETQRLVWACTGLEIGRGQPLGVGISGHPLLNKFDDTETSNKYAGKPGIDNRECLSMDYKQTQLCILGCKPPIGEHWGKGTPCNNNSGNPGDCPPLQLINSVIQDGDMVDTGFGCMDFNTLQASKSDVPIDICSSVCKYPDYLQMASEPYGDSLFFFLRREQMFVRHFFNRAGTLGDPVPGDLYIQGSNSGNTATVQSSAFFPTPSGSMVTSESQLFNKPYWLQRAQGHNNGICWGNQLFVTVVDTTRSTNMTLCAEVKKESTYKNENFKEYLRHGEEFDLQFIFQLCKITLTADVMTYIHKMDATILEDWQFGLTPPPSASLEDTYRFVTSTAITCQKNTPPKGKEDPLKDYMFWEVDLKEKFSADLDQFPLGRKFLLQAGLQARPKLKRPASSAPRTSTKKKKVKR

SEQ ID NO: 72 - protein, 466 aa, Human papillomavirus
MRYRRSTRHKRASATQLYQTCKASGTCPPDVIPKVEGTTIADQLLKYGSLGVFFGGLGIGTGAGSGGRAGYVPLSTRPPTSSITTSTIRPPVTVEPIGPLEPSIVSMIEETTFIESGAPAPSIPSATGFDVTTSANNTPAIINVTSIGESSVQSVSTHLNPTFTEPSIIQPPAPAEASGHVLFSSPTISTHTYEEIPMDTFVTSTDSSSVTSSTPIPGSRPTTRLGLYSRATQQVKVVDPAFMSSPQKLVTYNNPVFEGVDTDETIIFDRSQLLPAPDPDFLDIIALHRPALTSRRGTVRFSRLGNKATLRTRSGKQIGARVHYYHDISPIQPAEVQEDIELQPLLPQSVSPYTINDGLYDVYADSLQQPTFHLPSTLSTHNNTFTVPINSGIDFVYQPTMSIESGPDIPLPSLPTHTPFVPIAPTAPSTSIIVDGTDFILHPSYFLLRRRRKRFPYFFTDVRVAA

SEQ ID NO: 73 - protein, 310 aa, Human papillomavirus
MVPCLQVCKAKACSAIEVQIALESLSTTIYNNEEWTLRDTCEELWLTEPKKCFKKEGQHIEVWFDGSKNNCMQYVAWKYIYYNGDCGWQKVCSGVDYRGIYYVHDGHKTYYTDFEQEAKKFGCKNIWEVHMENESIYCPDSVSSTCRYNVSPVETVNEYNTHKTTTTTSTSVGNQDAAVSHRPGKRPRLRESEFDSSRESHAKCVTTHTHISDTDNTDSRSRSINNNNHPGDKTTPVVHLKGEPNRLKCCRYRFQKYKTLFVDVTSTYHWTSTDNKNYSIITIIYKDETQRNSFLSHVKIPVVYRLVWDK

SEQ ID NO: 74 - protein, 155 aa, Human papillomavirus
MEPQFNNPQERPRSLHHLSEVLEIPLIDLRLSCVYCKKELTRAEVYNFACTELKLVYRDDFPYAVCRVCLLFYSKVRKYRYYDYSVYGATLESITKKQLCDLLIRCYRCQSPLTPEEKQLHCDRKRRFHLIAHGWTGSCLGCWRQTSREPRESTV

SEQ ID NO: 75 - protein, 105 aa, Human papillomavirus
MHGKVPTLQDVVLELTPQTEIDLQCNEQLDSSEDEDEDEVDHLQERPQQARQAKQHTCYLIHVPCCECKFVVQLDIQSTKEDLRVVQQLLMGALTVTCPLCASSN

SEQ ID NO: 76 - protein, 534 aa, Human papillomavirus
MMLPMMYIYRDPPLHYGLCIFLDVGAVNVFPIFLQMATWRPSENKVYLPPTPVSKVVATDSYVKRTSIFYHAGSSRLLAVGHPYYSVTKDNTKTNIPKVSAYQYRVFRVRLPDPNKFGLPDTNIYNPDQERLVWACVGLEVGRGQPLGAGLSGHPLFNRLDDTESSNLANNNVIEDSRDNISVDGKQTQLCIVGCTPAMGEHWTKGAVCKSTQVTTGDCPPLALINTPIEDGDMIDTGFGAMDFKVLQESKAEVPLDIVQSTCKYPDYLKMSADAYGDSMWFYLRREQLFARHYFNRAGKVGETIPAELYLKGSNGREPPPSSVYVATPSGSMITSEAQLFNKPYWLQRAQGHNNGICWGNQLFVTVVDTTRSTNMTISTATEQLSKYDARKINQYLRHVEEYELQFVFQLCKITLSAEVMAYLHNMNANLLEDWNIGLSPPVATSLEDKYRYVRSTAITCQREQPPTEKQDPLAKYKFWDVNLQDSFSTDLDQFPLGRKFLMQLGTRSKPAVATSKKRSAPTSTSTPAKRKRR

SEQ ID NO: 77 - protein, 464 aa, Human papillomavirus
MVAHRATRRKRASATQLYKTCKLSGTCPEDVVNKIEQKTWADKILQWGSLFTYFGGLGIGTGTGSGGRAGYVPLGSRPSTIVDVTPARPPIVVESVGPTDPSIVTLVEESSVIESGAGIPNFTGSGGFEITSSSTTTPAVLDITPTSSTVHVSSTHITNPLFIDPPVIEAPQTGEVSGNILISTPTSGIHSYEEIPMQTFAVHGSGTEPISSTPIPGFRRIAAPRLYRKAFQQVKVTDPAFLDRPATLVSADNPLFEGTDTSLAFSPSGVAPDPDFMNIVALHRPAFTTRRGGVRFSRLGRKATIQTRRGTQIGARVHYYYDISPIAQAEEIEMQPLLSANNSFDGLYDIYANIDDEAPGLSSQSVATPSAHLPIKPSTLSFASNTTNVTAPLGNVWETPFYSGPDIVLPTGPSTWPFVPQSPYDVTHDVYIQGSSFALWPVYFFRRRRRKRIPYFFADGDVAA

SEQ ID NO: 78 - protein, 644 aa, Human papillomavirus
MDDPEGTNGVGAGCTGWFEVEAVIERRTGDNISDDEDETADDSGTDLIEFIDDSVQSTTQAEAEAARALFNVQEGVDDINAVCALKRKFAACSESAVEDCVDRAANVCVSWKYKNKECTHRKRKIIELEDSGYGNTEVETEQMAHQVESQNGDADLNDSESSGVGASSDVSSETDVDSCNTVPLQNISNILHNSNTKATLLYKFKEAYGVSFMELVRPFKSDKTSCTDWCITGYGISPSVAESLKVLIKQHSIYTHLQCLTCDRGIILLLLIRFKCSKNRLTVAKLMSNLLSIPETCMIIEPPKLRSQACALYWFRTAMSNISDVQGTTPEWIDRLTVLQHSFNDDIFDLSEMIQWAYDNDITDDSDIAYKYAQLADVNSNAAAFLRSNAQAKIVKDCGVMCRHYKRAEKRGMTMGQWIQSRCEKTNDGGNWRPIVQFLRYQNIEFTAFLVAFKQFLQGVPKKSCMLLCGPANTGKSYFGMSLIHFLKGCIISYVNSKSHFWLQPLSDAKLGMIDDVTAISWTYIDDYMRNALDGNDISIDVKHRALVQLKCPPLIITSNTNAGKDSRWPYLHSRLTVFEFNNPFPFDANGNPVYKINDENWKSFFSRTWCKLGLIEEEDKENDGGNISTFKCSAGQNPRHIRS

SEQ ID NO: 79 - protein, 358 aa, Human papillomavirus
MEEISARLSAVQDKILDIYEADKNDLTSQIEHWKLIRMECAIMYTARQMGISHLCHQVVPSLVASKTKAFQVIELQMALETLNASPYKTDEWTLQQTSLEVWLSEPQKCFKKKGITVTVQYDNDKANTMDYTNWSEIYIIEETTCTLVAGEVDYVGLYYIHGNEKTYFKYFKEDAKKYSKTQLWEVHVGSRVIVCPTSIPSDQISTTETADPKTTEATNNESTQGTKRRRLDLPDSRDNTQYSTKYTDCAVDSRPRGGGLHSTTNCTYKGRNVCSSKVSPIVHLKGDPNSLKCLRYRLKPFKDLYCNMSSTWHWTSDDKGDKVGIVTVTYTTETQRQLFLNTVKIPPTVQISTGVMSL

SEQ ID NO: 80 - protein, 149 aa, Human papillomavirus
MFQDAEEKPRTLHDLCQALETSVHEIELKCVECKKTLQRSEVYDFVFADLRIVYRDGNPFAVCKVCLRLLSKISEYRHYNYSLYGDTLEQTLKKCLNEILIRCIICQRPLCPQEKKRHVDLNKRFHNISGRWTGRCAVCWRPRRRQTQV

SEQ ID NO: 81 - protein, 98 aa, Human papillomavirus
MRGNNPTLREYILDLHPEPTDLFCYEQLCDSSDEDEIGLDGPDGQAQPATANYYIVTCCYTCGTTVRLCINSTTTDVRTLQQLLMGTCTIVCPSCAQQ

SEQ ID NO: 82 - protein, 524 aa, Human papillomavirus
MVLILCCTLAILFCVADVNVFHIFLQMSVWRPSEATVYLPPVPVSKVVSTDEYVSRTSIYYYAGSSRLLAVGNPYFSIKSPNNNKKVLVPKVSGLQYRVFRVRLPDPNKFGFPDTSFYNPDTQRLVWACVGLEIGRGQPLGVGVSGHPYLNKFDDTETSNRYPAQPGSDNRECLSMDYKQTQLCLIGCKPPTGEHWGKGVACNNNAAATDCPPLELFNSIIEDGDMVDTGFGCMDFGTLQANKSDVPIDICNSTCKYPDYLKMASEPYGDSLFFFLRREQMFVRHFFNRAGKLGEAVPDDLYIKGSGNTAVIQSSAFFPTPSGSIVTSESQLFNKPYWLQRAQGHNNGICWGNQLFVTVVDTTRSTNMTLCTEVTKEGTYKNDNFKEYVRHVEEYDLQFVFQLCKITLTAEIMTYIHTMDSNILEDWQFGLTPPPSASLQDTYRFVTSQAITCQKTAPPKEKEDPLNKYTFWEVNLKEKFSADLDQFPLGRKFLLQSGLKAKPRLKRSAPTTRAPSTKRKKVKK

SEQ ID NO: 83 - protein, 472 aa, Human papillomavirus
MRHKRSTRRKRASATQLYQTCKASGTCPPDVIPKVEGTTIADQILRYGSLGVFFGGLGIGTGSGTGGRTGYVPLGSTPPSEAIPLQPIRPPVTVDTVGPLDSSIVSLIEESSFIDAGAPAPSIPTPSGFDITTSADTTPAILNVSSIGESSIQTVSTHLNPSFTEPSVLRPPAPAEASGHLIFSSPTVSTHSYENIPMDTFVISTDSGNVTSSTPIPGSRPVARLGLYSRNTQQVKVVDPAFLTSPHRLVTYDNPAFEGFNPEDTLQFQHSDISPAPDPDFLDIVALHRPALTSRRGTVRYSRVGQKATLRTRSGKQIGAKVHYYQDLSPIQPVQEQVQQQQQFELQSLNTSVSPYSINDGLYDIYADDADTIHDFQSPLHSHTSFATTRTSNVSIPLNTGFDTPLVSLEPGPDIASSVTSMSSPFIPISPLTPFNTIIVDGADFMLHPSYFILRRRRKRFPYFFADVRVAA

SEQ ID NO: 84 - protein, 13 aa, Artificial Sequence
  Description of Artificial Sequence: Synthetic peptide
  MOD_RES (1): D-Ala or L-Ala
  MOD_RES (3)..(3): Cyclohexylalanine, Phe or Tyr
  MOD_RES (13): D-Ala or L-Ala
AKXVAAWTLKAAA

SEQ ID NO: 85 - protein, 9 aa, Human papillomavirus
YTAVVPLVY

SEQ ID NO: 86 - protein, 10 aa, Human papillomavirus
ETFGFEIQSY

SEQ ID NO: 87 - protein, 9 aa, Human papillomavirus
YTAVVPLVY

SEQ ID NO: 88 - protein, 9 aa, Human papillomavirus
RISGVDRYY

SEQ ID NO: 89 - protein, 10 aa, Human papillomavirus
FLPSDYFPSV

SEQ ID NO: 90 - protein, 10 aa, Human papillomavirus
FLPSDYFPSV

SEQ ID NO: 91 - protein, 10 aa, Human papillomavirus
FLPSDYFPSV

SEQ ID NO: 92 - protein, 10 aa, Human papillomavirus
FLPSDYFPSV

SEQ ID NO: 93 - protein, 9 aa, Human papillomavirus
YVIKVSARV

SEQ ID NO: 94 - protein, 10 aa, Human papillomavirus
KVFPYALINK

SEQ ID NO: 95 - protein, 9 aa, Human papillomavirus
AVDLYHFLK

SEQ ID NO: 96 - protein, 10 aa, Human papillomavirus
KVFPYALINK

SEQ ID NO: 97 - protein, 9 aa, Human papillomavirus
ILYKRETTR

SEQ ID NO: 98 - protein, 10 aa, Human papillomavirus
KVFPYALINK

SEQ ID NO: 99 - protein, 9 aa, Human papillomavirus
AYIDNYNKF

SEQ ID NO: 100 - protein, 9 aa, Human papillomavirus
AYIDNYNKF

SEQ ID NO: 101 - protein, 9 aa, Human papillomavirus
YTAVVPLVY

SEQ ID NO: 102 - protein, 9 aa, Human papillomavirus
RISGVDRYY

SEQ ID NO: 103 - protein, 9 aa, Human papillomavirus
APRTLVYLL

SEQ ID NO: 104 - protein, 9 aa, Human papillomavirus
FPFKYAAAF

SEQ ID NO: 105 - protein, 9 aa, Human papillomavirus
FPFKYAAAF

SEQ ID NO: 106 - protein, 9 aa, Human papillomavirus
FPFKYAAAF

SEQ ID NO: 107 - protein, 9 aa, Human papillomavirus
FPFKYAAAF

SEQ ID NO: 108 - protein, 9 aa, Human papillomavirus
SEIDLILGY

SEQ ID NO: 109 - protein, 9 aa, Human papillomavirus
YEFLQPILL

SEQ ID NO: 110 - protein, 9 aa, Human papillomavirus
YEFLQPILL

SEQ ID NO: 111 - protein, 9 aa, Human papillomavirus
SEIDLILGY

SEQ ID NO: 112 - protein, 9 aa, Human papillomavirus
SEIDLILGY

SEQ ID NO: 113 - protein, 9 aa, Human papillomavirus
AEFKYIAAV

SEQ ID NO: 114 - protein, 13 aa, Human papillomavirus
PKYVKQNTLKLAT

SEQ ID NO: 115 - protein, 12 aa, Human papillomavirus
YKTIAFDEEARR

SEQ ID NO: 116 - protein, 14 aa, Human papillomavirus
YARFQSQTTLKQKT

SEQ ID NO: 117 - protein, 14 aa, Human papillomavirus
YARFQSQTTLKQKT

SEQ ID NO: 118 - protein, 14 aa, Human papillomavirus
YARFQSQTTLKQKT

SEQ ID NO: 119 - protein, 13 aa, Human papillomavirus
PKYVKQNTIKLAT

SEQ ID NO: 120 - protein, 15 aa, Human papillomavirus
KSKYKLATSVLAGLL

SEQ ID NO: 121 - protein, 13 aa, Human papillomavirus
AKFVAAWTLKAAA

SEQ ID NO: 122 - protein, 13 aa, Human papillomavirus
PKFVKQNTLKGAT

SEQ ID NO: 123 - protein, 15 aa, Human papillomavirus
EALIHQLKINPYVLS

SEQ ID NO: 124 - protein, 14 aa, Human papillomavirus
QYIKANAKFIGITE

SEQ ID NO: 125 - protein, 24 aa, Human papillomavirus
GRTQDENPVVHFFKNIVTPRTPPP

SEQ ID NO: 126 - protein, 13 aa, Human papillomavirus
NGQIGNDPNRDIL

SEQ ID NO: 127 - protein, 14 aa, Human papillomavirus
YARFQSQTTLKQKT

SEQ ID NO: 128 - protein, 13 aa, Human papillomavirus
AKFVAAWTLKAAA

SEQ ID NO: 129 - protein, 15 aa, Human papillomavirus
YPFIEQEGPEFFDQE

SEQ ID NO: 130 - protein, 17 aa, Human papillomavirus
YAHAAHAAHAAHAAHAA

SEQ ID NO: 131 - protein, 14 aa, Human papillomavirus
EEDIEIIPIQEEEY

SEQ ID NO: 132 - protein, 14 aa, Clostridium tetani
QYIKANSKFIGITE

SEQ ID NO: 133 - protein, 21 aa, Plasmodium falciparum
DIEKKIAKMEKASSVFNVVNS

SEQ ID NO: 134 - protein, 16 aa, Streptococcus sp.
GAVDSILGGVATYGAA

SEQ ID NO: 135 - protein, 9 aa, Human papillomavirus
GTGCNGWFY

SEQ ID NO: 136 - protein, 9 aa, Human papillomavirus
GSGGGCSQY

SEQ ID NO: 137 - protein, 9 aa, Human papillomavirus
STAAALYWY

SEQ ID NO: 138 - protein, 9 aa, Human papillomavirus
LSQMVQWAY

SEQ ID NO: 139 - protein, 9 aa, Human papillomavirus
IVDDSEIAY

SEQ ID NO: 140 - protein, 9 aa, Human papillomavirus
MSMSQWIKY

SEQ ID NO: 141 - protein, 9 aa, Human papillomavirus
SSVAALYWY

SEQ ID NO: 142 - protein, 9 aa, Human papillomavirus
VMDDSEIAY

SEQ ID NO: 143 - protein, 10 aa, Human papillomavirus
SSNTKANILY

SEQ ID NO: 144 - protein, 9 aa, Human papillomavirus
CTDWCITGY

SEQ ID NO: 145 - protein, 9 aa, Human papillomavirus
LSEMVQWAY

SEQ ID NO: 146 - protein, 9 aa, Human papillomavirus
LTDDSDIAY

SEQ ID NO: 147 - protein, 10 aa, Human papillomavirus
LTDDSDIAYY

SEQ ID NO: 148 - protein, 9 aa, Human papillomavirus
ISWTYIDDY

SEQ ID NO: 149 - protein, 9 aa, Human papillomavirus
FGEMVQWAY

SEQ ID NO: 150 - protein, 9 aa, Human papillomavirus
ITDDSDIAY

SEQ ID NO: 151 - protein, 9 aa, Human papillomavirus
LSDLQDSGY

SEQ ID NO: 152 - protein, 9 aa, Human papillomavirus
SSNLQGKLY

SEQ ID NO: 153 - protein, 10 aa, Human papillomavirus
NSNTKATLLY

SEQ ID NO: 154 - protein, 9 aa, Human papillomavirus
LSEMIQWAY

SEQ ID NO: 155 - protein, 9 aa, Human papillomavirus
CQDKILTHY

SEQ ID NO: 156 - protein, 10 aa, Human papillomavirus
STDLRDHIDY

SEQ ID NO: 157 - protein, 9 aa, Human papillomavirus
LQDVSLEVY

SEQ ID NO: 158 - protein, 9 aa, Human papillomavirus
QVDYYGLYY

SEQ ID NO: 159 - protein, 9 aa, Human papillomavirus
KSAIVTLTY

SEQ ID NO: 160 - protein, 9 aa, Human papillomavirus
LQDKIIDHY

SEQ ID NO: 161 - protein, 10 aa, Human papillomavirus
ATCVSHRGLY

SEQ ID NO: 162 - protein, 9 aa, Human papillomavirus
KTGILTVTY

SEQ ID NO: 163 - protein, 9 aa, Human papillomavirus
DSVQILVGY

SEQ ID NO: 164 - protein, 9 aa, Human papillomavirus
CQDKILEHY

SEQ ID NO: 165 - protein, 10 aa, Human papillomavirus
MLETLNNTEY

SEQ ID NO: 166 - protein, 9 aa, Human papillomavirus
VQEKILDLY

SEQ ID NO: 167 - protein, 9 aa, Human papillomavirus
KVDYIGMYY

SEQ ID NO: 168 - protein, 10 aa, Human papillomavirus
ESNSLKCLRY

SEQ ID NO: 169 - protein, 9 aa, Human papillomavirus
LQDKILDHY

SEQ ID NO: 170 - protein, 9 aa, Human papillomavirus
NTGILTVTY

SEQ ID NO: 171 - protein, 9 aa, Human papillomavirus
IVEGQVDYY

SEQ ID NO: 172 - protein, 9 aa, Human papillomavirus
VTDSRNTKY

SEQ ID NO: 173 - protein, 10 aa, Human papillomavirus
ALESLSTTIY

SEQ ID NO: 174 - protein, 9 aa, Human papillomavirus
GVDYRGIYY

SEQ ID NO: 175 - protein, 9 aa, Human papillomavirus
DSVSSTCRY

SEQ ID NO: 176 - protein, 9 aa, Human papillomavirus
WTSTDNKNY

SEQ ID NO: 177 - protein, 9 aa, Human papillomavirus
VQDKILDIY

SEQ ID NO: 178 - protein, 9 aa, Human papillomavirus
EVDYVGLYY

SEQ ID NO: 179 - protein, 9 aa, Human papillomavirus
GNEKTYFKY

SEQ ID NO: 180 - protein, 10 aa, Human papillomavirus
ITDIILECVY

SEQ ID NO: 181 - protein, 10 aa, Human papillomavirus
IHDIILECVY

SEQ ID NO: 182 - protein, 9 aa, Human papillomavirus
VYDFAFRDL

SEQ ID NO: 183 - protein, 8 aa, Human papillomavirus
FRDLCIVY

SEQ ID NO: 184 - protein, 9 aa, Human papillomavirus
IVYRDGNPY

SEQ ID NO: 185 - protein, 10 aa, Human papillomavirus
AVCDKCLKFY

SEQ ID NO: 186 - protein, 9 aa, Human papillomavirus
VCDKCLKFY

SEQ ID NO: 187 - protein, 10 aa, Human papillomavirus
YSKISEYRHY

SEQ ID NO: 188 - protein, 10 aa, Human papillomavirus
YSDISEYRHY

SEQ ID NO: 189 - protein, 9 aa, Human papillomavirus
ISEYRHYCY

SEQ ID NO: 190 - protein, 9 aa, Human papillomavirus
ISDYRHYCY

SEQ ID NO: 191 - protein, 9 aa, Human papillomavirus
EYRHYCYSL

SEQ ID NO: 192 - protein, 10 aa, Human papillomavirus
EYRHYCYSLY

SEQ ID NO: 193 - protein, 10 aa, Human papillomavirus
ETRHYCYSLY

SEQ ID NO: 194 - protein, 10 aa, Human papillomavirus
EYDHYCYSLY

SEQ ID NO: 195 - protein, 9 aa, Human papillomavirus
CYSLYGTTL

SEQ ID NO: 196 - protein, 8 aa, Human papillomavirus
GTTLEQQY

SEQ ID NO: 197 - protein, 10 aa, Human papillomavirus
RFEDPTRRPY

SEQ ID NO: 198 - protein, 9 aa, Human papillomavirus
FEDPTRRPY

SEQ ID NO: 199 - protein, 9 aa, Human papillomavirus
KLPDLCTEL

SEQ ID NO: 200 - protein, 10 aa, Human papillomavirus
LQDIEITCVY

SEQ ID NO: 201 - protein, 10 aa, Human papillomavirus
LTDIEITCVY

SEQ ID NO: 202 - protein, 8 aa, Human papillomavirus
DIEITCVY

SEQ ID NO: 203 - protein, 9 aa, Human papillomavirus
VYCKTVLEL

SEQ ID NO: 204 - protein, 10 aa, Human papillomavirus
VFEFAFKDLF

SEQ ID NO: 205 - protein, 8 aa, Human papillomavirus
FKDLFVVY

SEQ ID NO: 206 - protein, 9 aa, Human papillomavirus
AACHKCIDF

SEQ ID NO: 207 - protein, 10 aa, Human papillomavirus
YSDIRELRHY

SEQ ID NO: 208 - protein, 10 aa, Human papillomavirus
YSRIRELRHY

SEQ ID NO: 209 - protein, 9 aa, Human papillomavirus
VYGDTLEKL

SEQ ID NO: 210 - protein, 11 aa, Human papillomavirus
TLEKLTNTGLY

SEQ ID NO: 211 - protein, 11 aa, Human papillomavirus
TLEKGPGPGLY

SEQ ID NO: 212 - protein, 11 aa, Human papillomavirus
TLEGPGPGGLY

SEQ ID NO: 213 - protein, 11 aa, Human papillomavirus
TLEKLGPGPGY

SEQ ID NO: 214 - protein, 11 aa, Human papillomavirus
TLGPGPGTGLY

SEQ ID NO: 215 - protein, 10 aa, Human papillomavirus
ELSSALEIPY

SEQ ID NO: 216 - protein, 10 aa, Human papillomavirus
ETSSALEIPY

SEQ ID NO: 217 - protein, 10 aa, Human papillomavirus
ELDSALEIPY

SEQ ID NO: 218 - protein, 9 aa, Human papillomavirus
LSSALEIPY

SEQ ID NO: 219 - protein, 9 aa, Human papillomavirus
LSDALEIPY

SEQ ID NO: 220 - protein, 9 aa, Human papillomavirus
LTSALEIPY

SEQ ID NO: 221 - protein, 8 aa, Human papillomavirus
SSALEIPY

SEQ ID NO: 222 - protein, 11 aa, Human papillomavirus
PYDELRLNCVY

SEQ ID NO: 223 - protein, 10 aa, Human papillomavirus
YDELRLNCVY

SEQ ID NO: 224 - protein, 10 aa, Human papillomavirus
FAFTDLTIVY

SEQ ID NO: 225 - protein, 9 aa, Human papillomavirus
AFTDLTIVY

SEQ ID NO: 226 - protein, 9 aa, Human papillomavirus
ATTDLTIVY

SEQ ID NO: 227 - protein, 8 aa, Human papillomavirus
FTDLTIVY

SEQ ID NO: 228 - protein, 9 aa, Human papillomavirus
GVCTKCLRF

SEQ ID NO: 229 - protein, 10 aa, Human papillomavirus
GVCTKCLRFY

SEQ ID NO: 230 - protein, 8 aa, Human papillomavirus
CTKCLRFY

SEQ ID NO: 231 - protein, 10 aa, Human papillomavirus
YSKVSEFRWY

SEQ ID NO: 232 - protein, 10 aa, Human papillomavirus
YSDVSEFRWY

SEQ ID NO: 233 - protein, 10 aa, Human papillomavirus
YTKVSEFRWY

SEQ ID NO: 234 - protein, 10 aa, Human papillomavirus
KVSEFRWYRY

SEQ ID NO: 235 - protein, 9 aa, Human papillomavirus
VSEFRWYRY

SEQ ID NO: 236 - protein, 9 aa, Human papillomavirus
VSDFRWYRY

SEQ ID NO: 237 - protein, 9 aa, Human papillomavirus
VTEFRWYRY

SEQ ID NO: 238 - protein, 10 aa, Human papillomavirus
RWTGRCIACW

SEQ ID NO: 239 - protein, 10 aa, Human papillomavirus
FAFADLTVVY

SEQ ID NO: 240 - protein, 9 aa, Human papillomavirus
AFADLTVVY

SEQ ID NO: 241 - protein, 8 aa, Human papillomavirus
FADLTVVY

SEQ ID NO: 242 - protein, 9 aa, Human papillomavirus
ISEYRHYNY

SEQ ID NO: 243 - protein, 9 aa, Human papillomavirus
ISDYRHYNY

SEQ ID NO: 244 - protein, 9 aa, Human papillomavirus
ITEYRHYNY

SEQ ID NO: 245 - protein, 9 aa, Human papillomavirus
NYSVYGNTL

SEQ ID NO: 246 - protein, 10 aa, Human papillomavirus
RWAGRCAACW

SEQ ID NO: 247 - protein, 10 aa, Human papillomavirus
RFDDPKQRPY

SEQ ID NO: 248 - protein, 9 aa, Human papillomavirus
FDDPKQRPY

SEQ ID NO: 249 - protein, 10 aa, Human papillomavirus
LQDVSIACVY

SEQ ID NO: 250 - protein, 10 aa, Human papillomavirus
LTDVSIACVY

SEQ ID NO: 251 - protein, 9 aa, Human papillomavirus
ATLERTEVY

SEQ ID NO: 252 - protein, 9 aa, Human papillomavirus
ATDERTEVY

SEQ ID NO: 253 - protein, 8 aa, Human papillomavirus
TLERTEVY

SEQ ID NO: 254 - protein, 10 aa, Human papillomavirus
FAFKDLCIVY

SEQ ID NO: 255 - protein, 9 aa, Human papillomavirus
AFKDLCIVY

SEQ ID NO: 256 - protein, 8 aa, Human papillomavirus
FKDLCIVY

SEQ ID NO: 257 - protein, 9 aa, Human papillomavirus
IVYRDCIAY

SEQ ID NO: 258 - protein, 10 aa, Human papillomavirus
FYSRIRELRY

SEQ ID NO: 259 - protein, 10 aa, Human papillomavirus
FTSRIRELRY

SEQ ID NO: 260 - protein, 9 aa, Human papillomavirus
YSRIRELRY

SEQ ID NO: 261 - protein, 10 aa, Human papillomavirus
YSRIRELRYY

SEQ ID NO: 262 - protein, 9 aa, Human papillomavirus
YSDIRELRY

SEQ ID NO: 263 - protein, 10 aa, Human papillomavirus
YSDIRELRYY

SEQ ID NO: 264 - protein, 11 aa, Human papillomavirus
TLEKITNTELY

SEQ ID NO: 265 - protein, 10 aa, Human papillomavirus
KKELQRREVY

SEQ ID NO: 266 - protein, 10 aa, Human papillomavirus
FLFTDLRIVY

SEQ ID NO: 267 - protein, 8 aa, Human papillomavirus
FTDLRIVY

SEQ ID NO: 268 - protein, 9 aa, Human papillomavirus
ISEYRHYQY

SEQ ID NO: 269 - protein, 9 aa, Human papillomavirus
ISDYRHYQY

SEQ ID NO: 270 - protein, 9 aa, Human papillomavirus
ITEYRHYQY

SEQ ID NO: 271 - protein, 9 aa, Human papillomavirus
QYSLYGKTL

SEQ ID NO: 272 - protein, 10 aa, Human papillomavirus
RWTGRCSECW

SEQ ID NO: 273 - protein, 10 aa, Human papillomavirus
LIDLRLSCVY

SEQ ID NO: 274 - protein, 10 aa, Human papillomavirus
LTDLRLSCVY

SEQ ID NO: 275 - protein, 10 aa, Human papillomavirus
KKELTRAEVY

SEQ ID NO: 276 - protein, 8 aa, Human papillomavirus
CTELKLVY

SEQ ID NO: 277 - protein, 9 aa, Human papillomavirus
LVYRDDFPY

SEQ ID NO: 278 - protein, 9 aa, Human papillomavirus
AVCRVCLLF

SEQ ID NO: 279 - protein, 10 aa, Human papillomavirus
AVCRVCLLFY

SEQ ID NO: 280 - protein, 10 aa, Human papillomavirus
FYSKVRKYRY

SEQ ID NO: 281 - protein, 10 aa, Human papillomavirus
FTSKVRKYRY

SEQ ID NO: 282 - protein, 9 aa, Human papillomavirus
YSKVRKYRY

SEQ ID NO: 283 - protein, 10 aa, Human papillomavirus
YSKVRKYRYY

SEQ ID NO: 284 - protein, 9 aa, Human papillomavirus
YSDVRKYRY

SEQ ID NO: 285 - protein, 10 aa, Human papillomavirus
YSDVRKYRYY

SEQ ID NO: 286 - protein, 10 aa, Human papillomavirus
KVRKYRYYDY

SEQ ID NO: 287 - protein, 10 aa, Human papillomavirus
KYRYYDYSVY

SEQ ID NO: 288 - protein, 10 aa, Human papillomavirus
KTRYYDYSVY

SEQ ID NO: 289 - protein, 10 aa, Human papillomavirus
KYDYYDYSVY

SEQ ID NO: 290 - protein, 9 aa, Human papillomavirus
DYSVYGATL

SEQ ID NO: 291 - protein, 9 aa, Human papillomavirus
LTDLLIRCY

SEQ ID NO: 292 - protein, 9 aa, Human papillomavirus
LCDLLIRCY

SEQ ID NO: 293 - protein, 9 aa, Human papillomavirus
KTDQRSEVY

SEQ ID NO: 294 - protein, 9 aa, Human papillomavirus
KTLQRSEVY

SEQ ID NO: 295 - protein, 10 aa, Human papillomavirus
FVFADLRIVY

SEQ ID NO: 296 - protein, 9 aa, Human papillomavirus
VTADLRIVY

SEQ ID NO: 297 - protein, 8 aa, Human papillomavirus
FADLRIVY

SEQ ID NO: 298 - protein, 10 aa, Human papillomavirus
KVSEYRHYNY

SEQ ID NO: 299 - protein, 10 aa, Human papillomavirus
EYRHYNYSLY

SEQ ID NO: 300 - protein, 10 aa, Human papillomavirus
ETRHYNYSLY

SEQ ID NO: 301 - protein, 10 aa, Human papillomavirus
EYDHYNYSLY

SEQ ID NO: 302 - protein, 9 aa, Human papillomavirus
NEILIRCII

SEQ ID NO: 303 - protein, 9 aa, Human papillomavirus
LIRCIICQR

SEQ ID NO: 304 - protein, 10 aa, Human papillomavirus
RWTGRCAVCW

SEQ ID NO: 305 - protein, 10 aa, Human papillomavirus
FAFRDLCIVY

SEQ ID NO: 306 - protein, 9 aa, Human papillomavirus
AVCDKCLKF

SEQ ID NO: 307 - protein, 9 aa, Human papillomavirus
LYNLLIRCL

SEQ ID NO: 308 - protein, 10 aa, Human papillomavirus
LSKISEYRHY

SEQ ID NO: 309 - protein, 10 aa, Human papillomavirus
LSDISEYRHY

SEQ ID NO: 310 - protein, 10 aa, Human papillomavirus
HGDTPTLHEY

SEQ ID NO: 311 - protein, 10 aa, Human papillomavirus
HTDTPTLHEY

SEQ ID NO: 312 - protein, 8 aa, Human papillomavirus
DTPTLHEY

SEQ ID NO: 313 - protein, 8 aa, Human papillomavirus
QPETTDLY

SEQ ID NO: 314 - protein, 10 aa, Human papillomavirus
QPETTDLYCY

SEQ ID NO: 315 - protein, 8 aa, Human papillomavirus
ETTDLYCY

SEQ ID NO: 316 - protein, 9 aa, Human papillomavirus
QAEPDRAHY

SEQ ID NO: 317 - protein, 10 aa, Human papillomavirus
RGETPTLQDY

SEQ ID NO: 318 - protein, 10 aa, Human papillomavirus
RTETPTLQDY

SEQ ID NO: 319 - protein, 9 aa, Human papillomavirus
GETPTLQDY

SEQ ID NO: 320 - protein, 8 aa, Human papillomavirus
ETPTLQDY

SEQ ID NO: 321 - protein, 10 aa, Human papillomavirus
QPEATDLHCY

SEQ ID NO: 322 - protein, 9 aa, Human papillomavirus
QAEPDTSNY

SEQ ID NO: 323 - protein, 9 aa, Human papillomavirus
QTEPDTSNY

SEQ ID NO: 324 - protein, 10 aa, Human papillomavirus
TFCCQCKSTL

SEQ ID NO: 325 - protein, 11 aa, Human papillomavirus
PTLKEYVLDLY

SEQ ID NO: 326 - protein, 10 aa, Human papillomavirus
TLKEYVLDLY

SEQ ID NO: 327 - protein, 9 aa, Human papillomavirus
LKEYVLDLY

SEQ ID NO: 328 - protein, 9 aa, Human papillomavirus
LTEYVLDLY

SEQ ID NO: 329 - protein, 8 aa, Human papillomavirus
YPEPTDLY

SEQ ID NO: 330 - protein, 10 aa, Human papillomavirus
YPEPTDLYCY

SEQ ID NO: 331 - protein, 9 aa, Human papillomavirus
QAQPATADY

SEQ ID NO: 332 - protein, 10 aa, Human papillomavirus
QAQPATADYY

SEQ ID NO: 333 - protein, 10 aa, Human papillomavirus
ELDPVDLLCY

SEQ ID NO: 334 - protein, 10 aa, Human papillomavirus
ETDPVDLLCY

SEQ ID NO: 335 - protein, 10 aa, Human papillomavirus
RGDKATIKDY

SEQ ID NO: 336 - protein, 10 aa, Human papillomavirus
QPETTDLHCY

SEQ ID NO: 337 - protein, 8 aa, Human papillomavirus
ETTDLHCY

SEQ ID NO: 338 - protein, 9 aa, Human papillomavirus
QAEQATSNY

SEQ ID NO: 339 - protein, 10 aa, Human papillomavirus
QAEQATSNYY

SEQ ID NO: 340 - protein, 9 aa, Human papillomavirus
QTEQATSNY

SEQ ID NO: 341 - protein, 10 aa, Human papillomavirus
QTEQATSNYY

SEQ ID NO: 342 - protein, 10 aa, Human papillomavirus
ATSNYYIVTY

SEQ ID NO: 343 - protein, 10 aa, Human papillomavirus
ATDNYYIVTY

SEQ ID NO: 344 - protein, 9 aa, Human papillomavirus
TSNYYIVTY

SEQ ID NO: 345 - protein, 9 aa, Human papillomavirus
TSDYYIVTY

SEQ ID NO: 346 - protein, 9 aa, Human papillomavirus
RQAKQHTCY

SEQ ID NO: 347 - protein, 9 aa, Human papillomavirus
RTAKQHTCY

SEQ ID NO: 348 - protein, 9 aa, Human papillomavirus
RQDKQHTCY

SEQ ID NO: 349 - protein, 9 aa, Human papillomavirus
HVPCCECKF

SEQ ID NO: 350 - protein, 9 aa, Human papillomavirus
GNNPTLREY

SEQ ID NO: 351 - protein, 10 aa, Human papillomavirus
HPEPTDLFCY

SEQ ID NO: 352 - protein, 10 aa, Human papillomavirus
GQAQPATANY

SEQ ID NO: 353 - protein, 9 aa, Human papillomavirus
QAQPATANY

SEQ ID NO: 354 - protein, 10 aa, Human papillomavirus
QAQPATANYY

SEQ ID NO: 355 - protein, 9 aa, Human papillomavirus
GDTPTLHEY

SEQ ID NO: 356 - protein, 10 aa, Human papillomavirus
DLQPETTDLY

SEQ ID NO: 357 - protein, 9 aa, Human papillomavirus
LLQQYCLYL

SEQ ID NO: 358 - protein, 10 aa, Human papillomavirus
SLACSWGMVV

SEQ ID NO: 359 - protein, 9 aa, Human papillomavirus
KLLSKLLCV

SEQ ID NO: 360 - protein, 9 aa, Human papillomavirus
ALYWYKTGI

SEQ ID NO: 361 - protein, 10 aa, Human papillomavirus
SLMKFLQGSV

SEQ ID NO: 362 - protein, 10 aa, Human papillomavirus
FLQGSVICFV

SEQ ID NO: 363 - protein, 9 aa, Human papillomavirus
LQGSVICFV

SEQ ID NO: 364 - protein, 10 aa, Human papillomavirus
YLHNRLVVFT

SEQ ID NO: 365 - protein, 9 aa, Human papillomavirus
AIFGVNPTI

SEQ ID NO: 366 - protein, 9 aa, Human papillomavirus
LIQPFILYA

SEQ ID NO: 367 - protein, 9 aa, Human papillomavirus
ILYAHIQCL

SEQ ID NO: 368 - protein, 9 aa, Human papillomavirus
ALYWYRTGI

SEQ ID NO: 369 - protein, 9 aa, Human papillomavirus
VQWAFDNEL

SEQ ID NO: 370 - protein, 9 aa, Human papillomavirus
MAFEYALLA

SEQ ID NO: 371 - protein, 9 aa, Human papillomavirus
QQIEFITFL

SEQ ID NO: 372 - protein, 9 aa, Human papillomavirus
FLGALKSFL

SEQ ID NO: 373 - protein, 10 aa, Human papillomavirus
FIQGAVISFV

SEQ ID NO: 374 - protein, 9 aa, Human papillomavirus
IQGAVISFV

SEQ ID NO: 375 - protein, 9 aa, Human papillomavirus
CLYCHLQSL

SEQ ID NO: 376 - protein, 9 aa, Human papillomavirus
KLLEKLLCI

SEQ ID NO: 377 - protein, 9 aa, Human papillomavirus
ALYWYRTGM

SEQ ID NO: 378 - protein, 9 aa, Human papillomavirus
VQWAYDNDV

SEQ ID NO: 379 - protein, 9 aa, Human papillomavirus
QQIEFVSFL

SEQ ID NO: 380 - protein, 9 aa, Human papillomavirus
FLSALKLFL

SEQ ID NO: 381 - protein, 10 aa, Human papillomavirus
FLQGCIISYA

SEQ ID NO: 382 - protein, 10 aa, Human papillomavirus
GMGCTGWFEV

SEQ ID NO: 383 - protein, 9 aa, Human papillomavirus
SLYTHLQCL

SEQ ID NO: 384 - protein, 9 aa, Human papillomavirus
KLMSNLLSI

SEQ ID NO: 385 - protein, 9 aa, Human papillomavirus
ALYWFRTAM

SEQ ID NO: 386 - protein, 9 aa, Human papillomavirus
VQWAYDNEL

SEQ ID NO: 387 - protein, 9 aa, Human papillomavirus
FLGAFKKFL

SEQ ID NO: 388 - protein, 10 aa, Human papillomavirus
FLKGCVISCV

SEQ ID NO: 389 - protein, 9 aa, Human papillomavirus
GMIDDVTPI

SEQ ID NO: 390 - protein, 9 aa, Human papillomavirus
AIFGVNPTV

SEQ ID NO: 391 - protein, 9 aa, Human papillomavirus
TLYAHIQCL

SEQ ID NO: 392 - protein, 10 aa, Human papillomavirus
FLQGAIISFV

SEQ ID NO: 393 - protein, 9 aa, Human papillomavirus
LQGAIISFV

SEQ ID NO: 394 - protein, 9 aa, Human papillomavirus
LIQPYSIYA

SEQ ID NO: 395 - protein, 9 aa, Human papillomavirus
KLMSQLLNI

SEQ ID NO: 396 - protein, 9 aa, Human papillomavirus
ALYWYRTGL

SEQ ID NO: 397 - protein, 9 aa, Human papillomavirus
VQWAYDHDI

SEQ ID NO: 398 - protein, 9 aa, Human papillomavirus
FLDAFKKFL

SEQ ID NO: 399 - protein, 10 aa, Human papillomavirus
FLSGCVISYV

SEQ ID NO: 400 - protein, 9 aa, Human papillomavirus
ALDGNDISV

SEQ ID NO: 401 - protein, 10 aa, Human papillomavirus
MQCLTCTWGV

SEQ ID NO: 402 - protein, 9 aa, Human papillomavirus
SLQDSQFEL

SEQ ID NO: 403 - protein, 9 aa, Human papillomavirus
VQWAFDNEV

SEQ ID NO: 404 - protein, 9 aa, Human papillomavirus
FQYAQLADV

SEQ ID NO: 405 - protein, 9 aa, Human papillomavirus
FLSYFKLFL

SEQ ID NO: 406 - protein, 9 aa, Human papillomavirus
FQGSVISFV

SEQ ID NO: 407 - protein, 9 aa, Human papillomavirus
YIDDYLRNL

SEQ ID NO: 408 - protein, 9 aa, Human papillomavirus
FQFQNPFPL

SEQ ID NO: 409 - protein, 9 aa, Human papillomavirus
ALFNVQEGV

SEQ ID NO: 410 - protein, 9 aa, Human papillomavirus
FLVAFKQFL

SEQ ID NO: 411 - protein, 10 aa, Human papillomavirus
FLKGCIISYV

SEQ ID NO: 412 - protein, 9 aa, Human papillomavirus
GMIDDVTAI

SEQ ID NO: 413 - protein, 9 aa, Human papillomavirus
TLQDVSLEV

SEQ ID NO: 414 - protein, 9 aa, Human papillomavirus
VAWDSVYYM

SEQ ID NO: 415 - protein, 9 aa, Human papillomavirus
YTNWKFIYL

SEQ ID NO: 416 - protein, 10 aa, Human papillomavirus
YLCIDGQCTV

SEQ ID NO: 417 - protein, 9 aa, Human papillomavirus
YTNWGEIYI

SEQ ID NO: 418 - protein, 9 aa, Human papillomavirus
KLFCADPAL

SEQ ID NO: 419 - protein, 10 aa, Human papillomavirus
RLENAILFTA

SEQ ID NO: 420 - protein, 10 aa, Human papillomavirus
YVVWDSIYYI

SEQ ID NO: 421 - protein, 9 aa, Human papillomavirus
VVWDSIYYI

SEQ ID NO: 422 - protein, 9 aa, Human papillomavirus
FQKYKTLFV

SEQ ID NO: 423 - protein, 9 aa, Human papillomavirus
FLSHVKIPV

SEQ ID NO: 424 - protein, 9 aa, Human papillomavirus
YTNWSEIYI

SEQ ID NO: 425 - protein, 9 aa, Human papillomavirus
KLPQLCTEL

SEQ ID NO: 426 - protein, 9 aa, Human papillomavirus
KLPQLCTEV

SEQ ID NO: 427 - protein, 9 aa, Human papillomavirus
QLCTELQTT

SEQ ID NO: 428 - protein, 10 aa, Human papillomavirus
QLCTELQTTI

SEQ ID NO: 429 - protein, 9 aa, Human papillomavirus
ELQTTIHDI

SEQ ID NO: 430 - protein, 10 aa, Human papillomavirus
ELQTTIHDII

SEQ ID NO: 431 - protein, 11 aa, Human papillomavirus
ELQTTIHDIIL

SEQ ID NO: 432 - protein, 9 aa, Human papillomavirus
LQTTIHDII

SEQ ID NO: 433 - protein, 10 aa, Human papillomavirus
TIHDIILECV

SEQ ID NO: 434 - protein, 10 aa, Human papillomavirus
TLHDIILECV

SEQ ID NO: 435 - protein, 11 aa, Human papillomavirus
ILECVYCKQQL

SEQ ID NO: 436 - protein, 8 aa, Human papillomavirus
CVYCKQQL

SEQ ID NO: 437 - protein, 9 aa, Human papillomavirus
CVYCKQQLL

SEQ ID NO: 438 - protein, 10 aa, Human papillomavirus
LLRREVYDFA

SEQ ID NO: 439 - protein, 10 aa, Human papillomavirus
EVYDFAFRDL

SEQ ID NO: 440 - protein, 9 aa, Human papillomavirus
FAFRDLCIV

SEQ ID NO: 441 - protein, 9 aa, Human papillomavirus
FLFRDLCIV

SEQ ID NO: 442 - protein, 10 aa, Human papillomavirus
IVYRDGNPYA

SEQ ID NO: 443 - protein, 8 aa, Human papillomavirus
CLKFYSKI

SEQ ID NO: 444 - protein, 10 aa, Human papillomavirus
TLEQQYNKPL

SEQ ID NO: 445 - protein, 10 aa, Human papillomavirus
QQYNKPLCDL

SEQ ID NO: 446 - protein, 10 aa, Human papillomavirus
PLCDLLIRCI

SEQ ID NO: 447 - protein, 8 aa, Human papillomavirus
CINCQKPL

SEQ ID NO: 448 - protein, 11 aa, Human papillomavirus
PLCPEEKQRHL

SEQ ID NO: 449 - protein, 10 aa, Human papillomavirus
CMSCCRSSRT

SEQ ID NO: 450 - protein, 9 aa, Human papillomavirus
  MOD_RES (6)..(6): Variable amino acid
KLPDLXTEL

SEQ ID NO: 451 - protein, 9 aa, Human papillomavirus
KLPDLCTEL

SEQ ID NO: 452 - protein, 10 aa, Human papillomavirus
DLCTELNTSL

SEQ ID NO: 453 - protein, 9 aa, Human papillomavirus
ELNTSLQDI

SEQ ID NO: 454 - protein, 10 aa, Human papillomavirus
NTSLQDIEIT

SEQ ID NO: 455 - protein, 10 aa, Human papillomavirus
SLQDIEITCV

SEQ ID NO: 456 - protein, 9 aa, Human papillomavirus
EITCVYCKT

SEQ ID NO: 457 - protein, 10 aa, Human papillomavirus
EITCVYCKTV

SEQ ID NO: 458 - protein, 8 aa, Human papillomavirus
CVYCKTVL

SEQ ID NO: 459 - protein, 10 aa, Human papillomavirus
CVYCKTVLEL

SEQ ID NO: 460 - protein, 9 aa, Human papillomavirus
KTVLELTEV

SEQ ID NO: 461 - protein, 9 aa, Human papillomavirus
KLVLELTEV

SEQ ID NO: 462 - protein, 8 aa, Human papillomavirus
TVLELTEV

SEQ ID NO: 463 - protein, 9 aa, Human papillomavirus
ELTEVFEFA

SEQ ID NO: 464 - protein, 10 aa, Human papillomavirus
EVFEFAFKDL

SEQ ID NO: 465 - protein, 9 aa, Human papillomavirus
FAFKDLFVV

SEQ ID NO: 466 - protein, 9 aa, Human papillomavirus
FLFKDLFVV

SEQ ID NO: 467 - protein, 10 aa, Human papillomavirus
RLQRRRETQV

SEQ ID NO: 468 - protein, 10 aa, Human papillomavirus
DLFVVYRDSI

SEQ ID NO: 469 - protein, 10 aa, Human papillomavirus
VVYRDSIPHA

SEQ ID NO: 470 - protein, 8 aa, Human papillomavirus
CIDFYSRI

SEQ ID NO: 471 - protein, 9 aa, Human papillomavirus
CIDFYSRIR

SEQ ID NO: 472 - protein, 9 aa, Human papillomavirus
ELRHYSDSV

SEQ ID NO: 473 - protein, 10 aa, Human papillomavirus
SVYGDTLEKL

SEQ ID NO: 474 - protein, 10 aa, Human papillomavirus
SLYGDTLEKL

SEQ ID NO: 475 - protein, 10 aa, Human papillomavirus
SVYGDTLEKV

SEQ ID NO: 476 - protein, 9 aa, Human papillomavirus
DTLEKLTNT

SEQ ID NO: 477 - protein, 10 aa, Human papillomavirus
TLEKLTNTGL

SEQ ID NO: 478 - protein, 10 aa, Human papillomavirus
KLTNTGLYNL

SEQ ID NO: 479 - protein, 11 aa, Human papillomavirus
KLTNTGLYNLL

SEQ ID NO: 480 - protein, 10 aa, Human papillomavirus
KLTNTGLYNV

SEQ ID NO: 481 - protein, 9 aa, Human papillomavirus
LTNTGLYNL

SEQ ID NO: 482 - protein, 9 aa, Human papillomavirus
NTGLYNLLI

SEQ ID NO: 483 - protein, 10 aa, Human papillomavirus
GLYNLLIRCL

SEQ ID NO: 484 - protein, 10 aa, Human papillomavirus
GLYNLLIRCV

SEQ ID NO: 485 - protein, 8 aa, Human papillomavirus
CLRCQKPL

SEQ ID NO: 486 - protein, 11 aa, Human papillomavirus
PLNPAEKLRHL

SEQ ID NO: 487 - protein, 9 aa, Human papillomavirus
KLHELSSAL

SEQ ID NO: 488 - protein, 9 aa, Human papillomavirus
KLHELSSAV

SEQ ID NO: 489 - protein, 10 aa, Human papillomavirus
SALEIPYDEL

SEQ ID NO: 490 - protein, 10 aa, Human papillomavirus
LTETEVLDFA

SEQ ID NO: 491 - protein, 10 aa, Human papillomavirus
EVLDFAFTDL

SEQ ID NO: 492 - protein, 9 aa, Human papillomavirus
VLDFAFTDL

SEQ ID NO: 493 - protein, 10 aa, Human papillomavirus
VLDFAFTDLT

SEQ ID NO: 494 - protein, 9 aa, Human papillomavirus
FAFTDLTIV

SEQ ID NO: 495 - protein, 9 aa, Human papillomavirus
FLFTDLTIV

SEQ ID NO: 496 - protein, 10 aa, Human papillomavirus
SVYGTTLEKL

SEQ ID NO: 497 - protein, 10 aa, Human papillomavirus
KLTNKGICDL

SEQ ID NO: 498 - protein, 10 aa, Human papillomavirus
KLTNKGICDV

SEQ ID NO: 499 - protein, 10 aa, Human papillomavirus
GICDLLIRCI

SEQ ID NO: 500 - protein, 10 aa, Human papillomavirus
QALETTIHNI

SEQ ID NO: 501 - protein, 10 aa, Human papillomavirus
QALETTIHNV

SEQ ID NO: 502 - protein, 10 aa, Human papillomavirus
QLLETTIHNI

SEQ ID NO: 503 - protein, 9 aa, Human papillomavirus
ALETTIHNI

SEQ ID NO: 504 - protein, 9 aa, Human papillomavirus
ALETTIHNV

SEQ ID NO: 505 - protein, 10 aa, Human papillomavirus
TIHNIELQCV

SEQ ID NO: 506 - protein, 10 aa, Human papillomavirus
TLHNIELQCV

SEQ ID NO: 507 - protein, 10 aa, Human papillomavirus
EVYDFAFADL

SEQ ID NO: 508 - protein, 9 aa, Human papillomavirus
FAFADLTVV

SEQ ID NO: 509 - protein, 9 aa, Human papillomavirus
FLFADLTVV

SEQ ID NO: 510 - protein, 10 aa, Human papillomavirus
GICKLCLRFL

SEQ ID NO: 511 - protein, 10 aa, Human papillomavirus
GLCKLCLRFL

SEQ ID NO: 512 - protein, 10 aa, Human papillomavirus
GICKLCLRFV

SEQ ID NO: 513 - protein, 10 aa, Human papillomavirus
KLCLRFLSKI

SEQ ID NO: 514 - protein, 10 aa, Human papillomavirus
KLCLRFLSKV

SEQ ID NO: 515 - protein, 10 aa, Human papillomavirus
SVYGNTLEQT

SEQ ID NO: 516 - protein, 10 aa, Human papillomavirus
SVYGNTLEQV

SEQ ID NO: 517 - protein, 10 aa, Human papillomavirus
SLYGNTLEQT

SEQ ID NO: 518 - protein, 10 aa, Human papillomavirus
PLNEILIRCI

SEQ ID NO: 519 - protein, 10 aa, Human papillomavirus
SLQDVSIACV

SEQ ID NO: 520 - protein, 9 aa, Human papillomavirus
LQDVSIACV

SEQ ID NO: 521 - protein, 9 aa, Human papillomavirus
LLDVSIACV

SEQ ID NO: 522 - protein, 9 aa, Human papillomavirus
SIACVYCKA

SEQ ID NO: 523 - protein, 10 aa, Human papillomavirus
YQFAFKDLCI

SEQ ID NO: 524 - protein, 10 aa, Human papillomavirus
YQFAFKDLCV

SEQ ID NO: 525 - protein, 10 aa, Human papillomavirus
YLFAFKDLCI

SEQ ID NO: 526 - protein, 9 aa, Human papillomavirus
FAFKDLCIV

SEQ ID NO: 527 - protein, 9 aa, Human papillomavirus
FLFKDLCIV

SEQ ID NO: 528 - protein, 10 aa, Human papillomavirus
IVYRDCIAYA

SEQ ID NO: 529 - protein, 10 aa, Human papillomavirus
ILYRDCIAYA

SEQ ID NO: 530 - protein, 10 aa, Human papillomavirus
IVYRDCIAYV

SEQ ID NO: 531 - protein, 10 aa, Human papillomavirus
IAYAACHKCI

SEQ ID NO: 532 - protein, 10 aa, Human papillomavirus
SVYGETLEKI

SEQ ID NO: 533 - protein, 10 aa, Human papillomavirus
SLYGETLEKI

SEQ ID NO: 534 - protein, 10 aa, Human papillomavirus
SVYGETLEKV

SEQ ID NO: 535 - protein, 10 aa, Human papillomavirus
KITNTELYNL

SEQ ID NO: 536 - protein, 10 aa, Human papillomavirus
KITNTELYNV

SEQ ID NO: 537 - protein, 10 aa, Human papillomavirus
KLTNTELYNL

SEQ ID NO: 538 - protein, 9 aa, Human papillomavirus
ITNTELYNL

SEQ ID NO: 539 - protein, 10 aa, Human papillomavirus
ELYNLLIRCL

SEQ ID NO: 540 - protein, 9 aa, Human papillomavirus
RTLHELCEV

SEQ ID NO: 541 - protein, 9 aa, Human papillomavirus
RLLHELCEV

SEQ ID NO: 542 - protein, 10 aa, Human papillomavirus
ELCEVLEESV

SEQ ID NO: 543 - protein, 9 aa, Human papillomavirus
VLEESVHEI

SEQ ID NO: 544 - protein, 9 aa, Human papillomavirus
VLEESVHEV

SEQ ID NO: 545 - protein, 10 aa, Human papillomavirus
SVHEIRLQCV

SEQ ID NO: 546 - protein, 10 aa, Human papillomavirus
SLHEIRLQCV

SEQ ID NO: 547 - protein, 9 aa, Human papillomavirus
FLFTDLRIV

SEQ ID NO: 548 - protein, 10 aa, Human papillomavirus
IMCLRFLSKI

SEQ ID NO: 549 - protein, 10 aa, Human papillomavirus
IMCLRFLSKV

SEQ ID NO: 550 - protein, 10 aa, Human papillomavirus
ILCLRFLSKI

SEQ ID NO: 551 - protein, 10 aa, Human papillomavirus
YQYSLYGKTL

SEQ ID NO: 552 - protein, 10 aa, Human papillomavirus
ITIRCIICQT

SEQ ID NO: 553 - protein, 10 aa, Human papillomavirus
HLSEVLEIPL

SEQ ID NO: 554 - protein, 10 aa, Human papillomavirus
HLSEVLEIPV

SEQ ID NO: 555 - protein, 10 aa, Human papillomavirus
EVLEIPLIDL

SEQ ID NO: 556 - protein, 10 aa, Human papillomavirus
PLIDLRLSCV

SEQ ID NO: 557 - protein, 9 aa, Human papillomavirus
LIDLRLSCV

SEQ ID NO: 558 - protein, 9 aa, Human papillomavirus
LLDLRLSCV

SEQ ID NO: 559 - protein, 9 aa, Human papillomavirus
FACTELKLV

SEQ ID NO: 560 - protein, 9 aa, Human papillomavirus
FLCTELKLV

SEQ ID NO: 561 - protein, 10 aa, Human papillomavirus
LVYRDDFPYA

SEQ ID NO: 562 - protein, 10 aa, Human papillomavirus
LLYRDDFPYA

SEQ ID NO: 563 - protein, 10 aa, Human papillomavirus
LVYRDDFPYV

SEQ ID NO: 564 - protein, 9 aa, Human papillomavirus
YAVCRVCLL

SEQ ID NO: 565 - protein, 10 aa, Human papillomavirus
RVCLLFYSKV

SEQ ID NO: 566 - protein, 10 aa, Human papillomavirus
SVYGATLESI

SEQ ID NO: 567 - protein, 10 aa, Human papillomavirus
SVYGATLESV

SEQ ID NO: 568 - protein, 10 aa, Human papillomavirus
SLYGATLESI

SEQ ID NO: 569 - protein, 10 aa, Human papillomavirus
IAHGWTGSCL

SEQ ID NO: 570 - protein, 10 aa, Human papillomavirus
QALETSVHEI

SEQ ID NO: 571 - protein, 10 aa, Human papillomavirus
QALETSVHEV

SEQ ID NO: 572 - protein, 10 aa, Human papillomavirus
QLLETSVHEI

SEQ ID NO: 573 - protein, 9 aa, Human papillomavirus
ALETSVHEI

SEQ ID NO: 574 - protein, 9 aa, Human papillomavirus
ALETSVHEV

SEQ ID NO: 575 - protein, 10 aa, Human papillomavirus
SVHEIELKCV

SEQ ID NO: 576 - protein, 10 aa, Human papillomavirus
EVYDFVFADL

SEQ ID NO: 577 - protein, 9 aa, Human papillomavirus
FVFADLRIV

SEQ ID NO: 578 - protein, 9 aa, Human papillomavirus
FLFADLRIV

SEQ ID NO: 579 - protein, 10 aa, Human papillomavirus
IVYRDGNPFA

SEQ ID NO: 580 - protein, 10 aa, Human papillomavirus
FAVCKVCLRL

SEQ ID NO: 581 - protein, 10 aa, Human papillomavirus
SLYGDTLEQT

SEQ ID NO: 582 - protein, 10 aa, Human papillomavirus
SLYGDTLEQV

SEQ ID NO: 583 - protein, 10 aa, Human papillomavirus
CLNEILIRCI

SEQ ID NO: 584 - protein, 10 aa, Human papillomavirus
CLNEILIRCV

SEQ ID NO: 585 - protein, 9 aa, Human papillomavirus
KLPDLCTEV

SEQ ID NO: 586 - protein, 9 aa, Human papillomavirus
RTLHDLCQA

SEQ ID NO: 587 - protein, 9 aa, Human papillomavirus
TLHDLCQAL

SEQ ID NO: 588 - protein, 9 aa, Human papillomavirus
TLHDLCQAV

SEQ ID NO: 589 - protein, 9 aa, Human papillomavirus
TLHEYMLDL

SEQ ID NO: 590 - protein, 9 aa, Human papillomavirus
TLHEYMLDV

SEQ ID NO: 591 - protein, 9 aa, Human papillomavirus
YMLDLQPET

SEQ ID NO: 592 - protein, 10 aa, Human papillomavirus
YMLDLQPETT

SEQ ID NO: 593 - protein, 9 aa, Human papillomavirus
YLLDLQPET

SEQ ID NO: 594 - protein, 9 aa, Human papillomavirus
YMLDLQPEV

SEQ ID NO: 595 - protein, 9 aa, Human papillomavirus
YLLDLQEPV

SEQ ID NO: 596 - protein, 10 aa, Human papillomavirus
YMLDLQPETV

SEQ ID NO: 597 - protein, 10 aa, Human papillomavirus
YLLDLQPETT

SEQ ID NO: 598 - protein, 8 aa, Human papillomavirus
MLDLQPET

SEQ ID NO: 599 - protein, 9 aa, Human papillomavirus
MLDLQPETT

SEQ ID NO: 600 - protein, 11 aa, Human papillomavirus
MLDLQPETTDL

SEQ ID NO: 601 - protein, 9 aa, Human papillomavirus
DLQPETTDL

SEQ ID NO: 602 - protein, 8 aa, Human papillomavirus
DLYCYEQL

SEQ ID NO: 603 - protein, 10 aa, Human papillomavirus
VTFCCKCDST

SEQ ID NO: 604 - protein, 10 aa, Human papillomavirus
STLRLCVQST

SEQ ID NO: 605 - protein, 11 aa, Human papillomavirus
TLRLCVQSTHV

SEQ ID NO: 606 - protein, 9 aa, Human papillomavirus
RLCVQSTHV

SEQ ID NO: 607 - protein, 9 aa, Human papillomavirus
CVQSTHVDI

SEQ ID NO: 608 - protein, 10 aa, Human papillomavirus
HVDIRTLEDL

SEQ ID NO: 609 - protein, 8 aa, Human papillomavirus
DIRTLEDL

SEQ ID NO: 610 - protein, 9 aa, Human papillomavirus
DIRTLEDLL

SEQ ID NO: 611 - protein, 10 aa, Human papillomavirus
RTLEDLLMGT

SEQ ID NO: 612 - protein, 9 aa, Human papillomavirus
TLEDLLMGT

SEQ ID NO: 613 - protein, 10 aa, Human papillomavirus
TLEDLLMGTL

SEQ ID NO: 614 - protein, 9 aa, Human papillomavirus
DLLMGTLGI

SEQ ID NO: 615 - protein, 10 aa, Human papillomavirus
DLLMGTLGIV

SEQ ID NO: 616 - protein, 8 aa, Human papillomavirus
LLMGTLGI

SEQ ID NO: 617 - protein, 9 aa, Human papillomavirus
LLMGTLGIV

SEQ ID NO: 618 - protein, 8 aa, Human papillomavirus
LMGTLGIV

SEQ ID NO: 619 - protein, 9 aa, Human papillomavirus
GTLGIVCPI

SEQ ID NO: 620 - protein, 10 aa, Human papillomavirus
GTLGIVCPIC

SEQ ID NO: 621 - protein, 9 aa, Human papillomavirus
GLLGIVCPI

SEQ ID NO: 622 - protein, 9 aa, Human papillomavirus
GTLGIVCPV

SEQ ID NO: 623 - protein, 8 aa, Human papillomavirus
TLGIVCPI

SEQ ID NO: 624 - protein, 9 aa, Human papillomavirus
TLGIVCPIC

SEQ ID NO: 625 - protein, 8 aa, Human papillomavirus
TLGIVCPV

SEQ ID NO: 626 - protein, 8 aa, Human papillomavirus
  MOD_RES (6)..(6): Variable amino acid
TLGIVXPI

SEQ ID NO: 627 - protein, 8 aa, Human papillomavirus
TLGIVSPI

SEQ ID NO: 628 - protein, 9 aa, Human papillomavirus
TLQDIVLHL

SEQ ID NO: 629 - protein, 9 aa, Human papillomavirus
TLQDIVLHV

SEQ ID NO: 630 - protein, 9 aa, Human papillomavirus
TLQGPGPGL

SEQ ID NO: 631 - protein, 9 aa, Human papillomavirus
TLGPGPGHL

SEQ ID NO: 632 - protein, 10 aa, Human papillomavirus
VLHLEPQNEI

SEQ ID NO: 633 - protein, 8 aa, Human papillomavirus
HLEPQNEI

SEQ ID NO: 634 - protein, 10 aa, Human papillomavirus
HLEPQNEIPV

SEQ ID NO: 635 - protein, 10 aa, Human papillomavirus
PVDLLCHEQL

SEQ ID NO: 636 - protein, 8 aa, Human papillomavirus
DLLCHEQL

SEQ ID NO: 637 - protein, 10 aa, Human papillomavirus
EIDGVNHQHL

SEQ ID NO: 638 - protein, 9 aa, Human papillomavirus
GVNHQHLPA

SEQ ID NO: 639 - protein, 10 aa, Human papillomavirus
MLCMCCKCEA

SEQ ID NO: 640 - protein, 10 aa, Human papillomavirus
MLCMCCKCEV

SEQ ID NO: 641 - protein, 8 aa, Human papillomavirus
CMCCKCEA

SEQ ID NO: 642 - protein, 10 aa, Human papillomavirus
CMCCKCEARI

SEQ ID NO: 643 - protein, 8 aa, Human papillomavirus
KLVVESSA

SEQ ID NO: 644 - protein, 11 aa, Human papillomavirus
KLVVESSADDL

SEQ ID NO: 645 - protein, 10 aa, Human papillomavirus
LVVESSADDL

SEQ ID NO: 646 - protein, 9 aa, Human papillomavirus
VVESSADDL

SEQ ID NO: 647 - protein, 8 aa, Human papillomavirus
DLRAFQQL

SEQ ID NO: 648 - protein, 10 aa, Human papillomavirus
DLRAFQQLFL

SEQ ID NO: 649 - protein, 10 aa, Human papillomavirus
RAFQQLFLNT

SEQ ID NO: 650 - protein, 9 aa, Human papillomavirus
FQQLFLNTL

SEQ ID NO: 651 - protein, 9 aa, Human papillomavirus
FLQLFLNTL

SEQ ID NO: 652 - protein, 9 aa, Human papillomavirus
FQQLFLNTV

SEQ ID NO: 653 - protein, 10 aa, Human papillomavirus
QLFLNTLSFV

SEQ ID NO: 654 - protein, 8 aa, Human papillomavirus
FLNTLSFV

SEQ ID NO: 655 - protein, 9 aa, Human papillomavirus
TLQDYVLDL

SEQ ID NO: 656 - protein, 9 aa, Human papillomavirus
TLQDYVLDV

SEQ ID NO: 657 - protein, 9 aa, Human papillomavirus
YVLDLQPEA

SEQ ID NO: 658 - protein, 10 aa, Human papillomavirus
YVLDLQPEAT

SEQ ID NO: 659 - protein, 9 aa, Human papillomavirus
YLLDLQPEA

SEQ ID NO: 660 - protein, 9 aa, Human papillomavirus
YVLDLQPEV

SEQ ID NO: 661 - protein, 10 aa, Human papillomavirus
YLLDLQPEAT

SEQ ID NO: 662 - protein, 10 aa, Human papillomavirus
YVLDLQPEAV

SEQ ID NO: 663 - protein, 10 aa, Human papillomavirus
VTFCCQCKST

SEQ ID NO: 664 - protein, 9 aa, Human papillomavirus
TLRLCVQST

SEQ ID NO: 665 - protein, 9 aa, Human papillomavirus
RLCVQSTQV

SEQ ID NO: 666 - protein, 9 aa, Human papillomavirus
ELLMGSFGI

SEQ ID NO: 667 - protein, 10 aa, Human papillomavirus
ELLMGSFGIV

SEQ ID NO: 668 - protein, 9 aa, Human papillomavirus
LLMGSFGIV

SEQ ID NO: 669 - protein, 9 aa, Human papillomavirus
GIVCPNCST

SEQ ID NO: 670 - protein, 9 aa, Human papillomavirus
TLKEYVLDL

SEQ ID NO: 671 - protein, 10 aa, Human papillomavirus
YVLDLYPEPT

SEQ ID NO: 672 - protein, 10 aa, Human papillomavirus
YVLDLYPEPV

SEQ ID NO: 673 - protein, 10 aa, Human papillomavirus
YLLDLYPEPT

SEQ ID NO: 674 - protein, 9 aa, Human papillomavirus
VLDLYPEPT

SEQ ID NO: 675 - protein, 10 aa, Human papillomavirus
AQPATADYYI

SEQ ID NO: 676 - protein, 10 aa, Human papillomavirus
RTIQQLLMGT

SEQ ID NO: 677 - protein, 10 aa, Human papillomavirus
TIQQLLMGTV

SEQ ID NO: 678 - protein, 9 aa, Human papillomavirus
IQQLLMGTV

SEQ ID NO: 679 - protein, 10 aa, Human papillomavirus
QLLMGTVNIV

SEQ ID NO: 680 - protein, 9 aa, Human papillomavirus
LLMGTVNIV

SEQ ID NO: 681 - protein, 9 aa, Human papillomavirus
TLQEIVLHL

SEQ ID NO: 682 - protein, 9 aa, Human papillomavirus
TLQEIVLHV

SEQ ID NO: 683 - protein, 9 aa, Human papillomavirus
GVSHAQLPA

SEQ ID NO: 684 - protein, 10 aa, Human papillomavirus
RTLQQLFLST

SEQ ID NO: 685 - protein, 9 aa, Human papillomavirus
TLQQLFLST

SEQ ID NO: 686 - protein, 10 aa, Human papillomavirus
TLQQLFLSTL

SEQ ID NO: 687 - protein, 9 aa, Human papillomavirus
LQQLFLSTL

SEQ ID NO: 688 - protein, 9 aa, Human papillomavirus
LLQLFLSTL

SEQ ID NO: 689 - protein, 9 aa, Human papillomavirus
LQQLFLSTV

SEQ ID NO: 690 - protein, 10 aa, Human papillomavirus
QLFLSTLSFV

SEQ ID NO: 691 - protein, 9 aa, Human papillomavirus
YILDLQPET

SEQ ID NO: 692 - protein, 10 aa, Human papillomavirus
YILDLQPETT

SEQ ID NO: 693 - protein, 9 aa, Human papillomavirus
YILDLQPEV

SEQ ID NO: 694 - protein, 10 aa, Human papillomavirus
YILDLQPETV

SEQ ID NO: 695 - protein, 10 aa, Human papillomavirus
TLRLCIHSTA

SEQ ID NO: 696 - protein, 9 aa, Human papillomavirus
RLCIHSTAT

SEQ ID NO: 697 - protein, 10 aa, Human papillomavirus
RTLQQMLLGT

SEQ ID NO: 698 - protein, 9 aa, Human papillomavirus
TLQQMLLGT

SEQ ID NO: 699 - protein, 10 aa, Human papillomavirus
TLQQMLLGTL

SEQ ID NO: 700 - protein, 9 aa, Human papillomavirus
TLQQMLLGV

SEQ ID NO: 701 - protein, 10 aa, Human papillomavirus
QQMLLGTLQV

SEQ ID NO: 702 - protein, 10 aa, Human papillomavirus
QLMLLGTLQV

SEQ ID NO: 703 - protein, 9 aa, Human papillomavirus
QMLLGTLQV

SEQ ID NO: 704 - protein, 10 aa, Human papillomavirus
QMLLGTLQVV

SEQ ID NO: 705 - protein, 9 aa, Human papillomavirus
QLLLGTLQV

SEQ ID NO: 706 - protein, 10 aa, Human papillomavirus
QLLLGTLQVV

SEQ ID NO: 707 - protein, 9 aa, Human papillomavirus
MLLGTLQVV

SEQ ID NO: 708 - protein, 10 aa, Human papillomavirus
TLQVVCPGCA

SEQ ID NO: 709 - protein, 9 aa, Human papillomavirus
TLQDVVLEL

SEQ ID NO: 710 - protein, 10 aa, Human papillomavirus
TLQDVVLELT

SEQ ID NO: 711 - protein, 9 aa, Human papillomavirus
TLQDVVLEV

SEQ ID NO: 712 - protein, 10 aa, Human papillomavirus
KQHTCYLIHV

SEQ ID NO: 713 - protein, 10 aa, Human papillomavirus
KLHTCYLIHV

SEQ ID NO: 714 - protein, 10 aa, Human papillomavirus
RVVQQLLMGA

SEQ ID NO: 715 - protein, 10 aa, Human papillomavirus
RVVQQLLMGV

SEQ ID NO: 716 - protein, 10 aa, Human papillomavirus
RLVQQLLMGA

SEQ ID NO: 717 - protein, 9 aa, Human papillomavirus
QLLMGALTV

SEQ ID NO: 718 - protein, 10 aa, Human papillomavirus
QLLMGALTVT

SEQ ID NO: 719 - protein, 10 aa, Human papillomavirus
QLLMGALTVV

SEQ ID NO: 720 - protein, 9 aa, Human papillomavirus
LLMGALTVT

SEQ ID NO: 721 - protein, 9 aa, Human papillomavirus
LLMGALTVV

SEQ ID NO: 722 - protein, 9 aa, Human papillomavirus
GALTVTCPL

SEQ ID NO: 723 - protein, 9 aa, Human papillomavirus
GLLTVTCPL

SEQ ID NO: 724 - protein, 9 aa, Human papillomavirus
GALTVTCPV

SEQ ID NO: 725 - protein, 10 aa, Human papillomavirus
ALTVTCPLCA

SEQ ID NO: 726 - protein, 9 aa, Human papillomavirus
LTVTCPLCA

SEQ ID NO: 727 - protein, 9 aa, Human papillomavirus
TLREYILDL

SEQ ID NO: 728 - protein, 10 aa, Human papillomavirus
YILDLHPEPT

SEQ ID NO: 729 - protein, 10 aa, Human papillomavirus
YLLDLHPEPT

SEQ ID NO: 730 - protein, 10 aa, Human papillomavirus
YILDLHPEPV

SEQ ID NO: 731 - protein, 9 aa, Human papillomavirus
ILDLHPEPT

SEQ ID NO: 732 - protein, 10 aa, Human papillomavirus
AQPATANYYI

SEQ ID NO: 733 - protein, 9 aa, Human papillomavirus
YTCGTTVRL

SEQ ID NO: 734 - protein, 9 aa, Human papillomavirus
YLCGTTVRL

SEQ ID NO: 735 - protein, 9 aa, Human papillomavirus
YTCGTTVRV

SEQ ID NO: 736 - protein, 10 aa, Human papillomavirus
RTLQQLLMGT

SEQ ID NO: 737 - protein, 9 aa, Human papillomavirus
TLQQLLMGT

SEQ ID NO: 738 - protein, 10 aa, Human papillomavirus
QLLMGTCTIV

SEQ ID NO: 739 - protein, 9 aa, Human papillomavirus
LLMGTCTIV

SEQ ID NO: 740 - protein, 10 aa, Human papillomavirus
TLSFVCPWCV

SEQ ID NO: 741 - protein, 10 aa, Human papillomavirus
TLSFVCPWCA

SEQ ID NO: 742 - protein, 9 aa, Human papillomavirus
GTGCNGWFY

SEQ ID NO: 743 - protein, 10 aa, Human papillomavirus
WFYVEAVVEK

SEQ ID NO: 744 - protein, 9 aa, Human papillomavirus
ALFTAQEAK

SEQ ID NO: 745 - protein, 9 aa, Human papillomavirus
RLKAICIEK

SEQ ID NO: 746 - protein, 9 aa, Human papillomavirus
KQSRAAKRR

SEQ ID NO: 747 - protein, 10 aa, Human papillomavirus
TQQMLQVEGR

SEQ ID NO: 748 - protein, 9 aa, Human papillomavirus
LTNILNVLK

SEQ ID NO: 749 - protein, 10 aa, Human papillomavirus
SFSELVRPFK

SEQ ID NO: 750 - protein, 10 aa, Human papillomavirus
KTLLQQYCLY

SEQ ID NO: 751 - protein, 10 aa, Human papillomavirus
MVVLLLVRYK

SEQ ID NO: 752 - protein, 9 aa, Human papillomavirus
VVLLLVRYK

SEQ ID NO: 753 - protein, 10 aa, Human papillomavirus
STAAALYWYK

SEQ ID NO: 754 - protein, 9 aa, Human papillomavirus
STAAALYWY

SEQ ID NO: 755 - protein, 9 aa, Human papillomavirus
NSNASAFLK

SEQ ID NO: 756 - protein, 10 aa, Human papillomavirus
AFLKSNSQAK

SEQ ID NO: 757 - protein, 10 aa, Human papillomavirus
IVKDCATMCR

SEQ ID NO: 758 - protein, 9 aa, Human papillomavirus
ATMCRHYKR

SEQ ID NO: 759 - protein, 10 aa, Human papillomavirus
KQMSMSQWIK

SEQ ID NO: 760 - protein, 10 aa, Human papillomavirus
SQWIKYRCDR

SEQ ID NO: 761 - protein, 9 aa, Human papillomavirus
KQIVMFLRY

SEQ ID NO: 762 - protein, 10 aa, Human papillomavirus
EFMSFLTALK

SEQ ID NO: 763 - protein, 9 aa, Human papillomavirus
MSFLTALKR

SEQ ID NO: 764 - protein, 10 aa, Human papillomavirus
LLYGAANTGK

SEQ ID NO: 765 - protein, 10 aa, Human papillomavirus
KSLFGMSLMK

SEQ ID NO: 766 - protein, 9 aa, Human papillomavirus
SLFGMSLMK

SEQ ID NO: 767 - protein, 9 aa, Human papillomavirus
SVICFVNSK

SEQ ID NO: 768 - protein, 9 aa, Human papillomavirus
SFFSRTWSR

SEQ ID NO: 769 - protein, 10 aa, Human papillomavirus
WFYVQAIVDK

SEQ ID NO: 770 - protein, 10 aa, Human papillomavirus
AQVLHVLKRK

SEQ ID NO: 771 - protein, 9 aa, Human papillomavirus
AQVLHVLKR

SEQ ID NO: 772 - protein, 9 aa, Human papillomavirus
PQCTIAQLK

SEQ ID NO: 773 - protein, 10 aa, Human papillomavirus
KQGAMLAVFK

SEQ ID NO: 774 - protein, 10 aa, Human papillomavirus
SFTDLVRNFK

SEQ ID NO: 775 - protein, 9 aa, Human papillomavirus
TLIQPFILY

SEQ ID NO: 776 - protein, 9 aa, Human papillomavirus
GVLILALLR

SEQ ID NO: 777 - protein, 10 aa, Human papillomavirus
VLILALLRYK

SEQ ID NO: 778 - protein, 9 aa, Human papillomavirus
ALLRYKCGK

SEQ ID NO: 779 - protein, 9 aa, Human papillomavirus
MLIQPPKLR

SEQ ID NO: 780 - protein, 9 aa, Human papillomavirus
SSVAALYWY

SEQ ID NO: 781 - protein, 9 aa, Human papillomavirus
SVAALYWYR

SEQ ID NO: 782 - protein, 9 aa, Human papillomavirus
NSNAAAFLK

SEQ ID NO: 783 - protein, 10 aa, Human papillomavirus
AFLKSNCQAK

SEQ ID NO: 784 - protein, 10 aa, Human papillomavirus
YLKDCATMCK

SEQ ID NO: 785 - protein, 9 aa, Human papillomavirus
ATMCKHYRR

SEQ ID NO: 786 - protein, 10 aa, Human papillomavirus
SQWIRFRCSK

SEQ ID NO: 787 - protein, 10 aa, Human papillomavirus
FLGALKSFLK

SEQ ID NO: 788 - protein, 9 aa, Human papillomavirus
KSFLKGTPK

SEQ ID NO: 789 - protein, 10 aa, Human papillomavirus
KSFLKGTPKK

SEQ ID NO: 790 - protein, 9 aa, Human papillomavirus
SFLKGTPKK

SEQ ID NO: 791 - protein, 10 aa, Human papillomavirus
VFCGPANTGK

SEQ ID NO: 792 - protein, 9 aa, Human papillomavirus
WTYFDTYMR

SEQ ID NO: 793 - protein, 9 aa, Human papillomavirus
LTTNIHPAK

SEQ ID NO: 794 - protein, 10 aa, Human papillomavirus
EFPNAFPFDK

SEQ ID NO: 795 - protein, 9 aa, Human papillomavirus
CFFERTWSR

SEQ ID NO: 796 - protein, 10 aa, Human papillomavirus
LQVLKTSNGK

SEQ ID NO: 797 - protein, 10 aa, Human papillomavirus
KTLLQPYCLY

SEQ ID NO: 798 - protein, 9 aa, Human papillomavirus
TLLQPYCLY

SEQ ID NO: 799 - protein, 10 aa, Human papillomavirus
MVMLMLVRFK

SEQ ID NO: 800 - protein, 9 aa, Human papillomavirus
MLVRFKCAK

SEQ ID NO: 801 - protein, 9 aa, Human papillomavirus
ITIEKLLEK

SEQ ID NO: 802 - protein, 10 aa, Human papillomavirus
STAAALYWYR

SEQ ID NO: 803 - protein, 9 aa, Human papillomavirus
DSNACAFLK

SEQ ID NO: 804 - protein, 9 aa, Human papillomavirus
GTMCRHYKR

SEQ ID NO: 805 - protein, 10 aa, Human papillomavirus
RQMSMGQWIK

SEQ ID NO: 806 - protein, 10 aa, Human papillomavirus
GQWIKSRCDK

SEQ ID NO: 807 - protein, 10 aa, Human papillomavirus
EFVSFLSALK

SEQ ID NO: 808 - protein, 9 aa, Human papillomavirus
FVSFLSALK

SEQ ID NO: 809 - protein, 10 aa, Human papillomavirus
FLSALKLFLK

SEQ ID NO: 810 - protein, 9 aa, Human papillomavirus
LSALKLFLK

SEQ ID NO: 811 - protein, 10 aa, Human papillomavirus
KLFLKGVPKK

SEQ ID NO: 812 - protein, 9 aa, Human papillomavirus
KLFLKGVPK

SEQ ID NO: 813 - protein, 10 aa, Human papillomavirus
SFLQGCIISY

SEQ ID NO: 814 - protein, 10 aa, Human papillomavirus
TFPNPFPFDK

SEQ ID NO: 815 - protein, 9 aa, Human papillomavirus
SFFSRTWCR

SEQ ID NO: 816 - protein, 9 aa, Human papillomavirus
NTKANILYK

SEQ ID NO: 817 - protein, 10 aa, Human papillomavirus
SFMELVRPFK

SEQ ID NO: 818 - protein, 10 aa, Human papillomavirus
LLLIRFRCSK

SEQ ID NO: 819 - protein, 9 aa, Human papillomavirus
LLIRFRCSK

SEQ ID NO: 820 - protein, 9 aa, Human papillomavirus
MVIEPPKLR

SEQ ID NO: 821 - protein, 10 aa, Human papillomavirus
SQTCALYWFR

SEQ ID NO: 822 - protein, 9 aa, Human papillomavirus
QTCALYWFR

SEQ ID NO: 823 - protein, 10 aa, Human papillomavirus
GQWIQSRCEK

SEQ ID NO: 824 - protein, 10 aa, Human papillomavirus
EFTAFLGAFK

SEQ ID NO: 825 - protein, 9 aa, Human papillomavirus
FTAFLGAFK

SEQ ID NO: 826 - protein, 10 aa, Human papillomavirus
FTAFLGAFKK

SEQ ID NO: 827 - protein, 10 aa, Human papillomavirus
FLGAFKKFLK

SEQ ID NO: 828 - protein, 10 aa, Human papillomavirus
KSFFSRTWCK

SEQ ID NO: 829 - protein, 9 aa, Human papillomavirus
SFFSRTWCK

SEQ ID NO: 830 - protein, 10 aa, Human papillomavirus
WFFVETIVEK

SEQ ID NO: 831 - protein, 10 aa, Human papillomavirus
AQVLHLLKRK

SEQ ID NO: 832 - protein, 9 aa, Human papillomavirus
AQVLHLLKR

SEQ ID NO: 833 - protein, 9 aa, Human papillomavirus
QVLHLLKRK

SEQ ID NO: 834 - protein, 9 aa, Human papillomavirus
MLIEPPKLR

SEQ ID NO: 835 - protein, 9 aa, Human papillomavirus
AVMCRHYKR

SEQ ID NO: 836 - protein, 10 aa, Human papillomavirus
RQMNMSQWIK

SEQ ID NO: 837 - protein, 10 aa, Human papillomavirus
SQWIKYRCSK

SEQ ID NO: 838 - protein, 9 aa, Human papillomavirus
GVEFISFLR

SEQ ID NO: 839 - protein, 10 aa, Human papillomavirus
LLYGPANTGK

SEQ ID NO: 840 - protein, 10 aa, Human papillomavirus
TFPHAFPFDK

SEQ ID NO: 841 - protein, 9 aa, Human papillomavirus
KTTVLFKFK

SEQ ID NO: 842 - protein, 9 aa, Human papillomavirus
GVLILLLIR

SEQ ID NO: 843 - protein, 10 aa, Human papillomavirus
VLILLLIRFK

SEQ ID NO: 844 - protein, 10 aa, Human papillomavirus
LLLIRFKCGK

SEQ ID NO: 845 - protein, 9 aa, Human papillomavirus
ATCALYWYR

SEQ ID NO: 846 - protein, 10 aa, Human papillomavirus
EFTAFLDAFK

SEQ ID NO: 847 - protein, 10 aa, Human papillomavirus
VLYGPANTGK

SEQ ID NO: 848 - protein, 9 aa, Human papillomavirus
NTNAGTDPR

SEQ ID NO: 849 - protein, 9 aa, Human papillomavirus
GTFKCSAGK

SEQ ID NO: 850 - protein, 10 aa, Human papillomavirus
LQVQTAHADK

SEQ ID NO: 851 - protein, 10 aa, Human papillomavirus
KQTLQKLKRK

SEQ ID NO: 852 - protein, 10 aa, Human papillomavirus
QQTVCREGVK

SEQ ID NO: 853 - protein, 9 aa, Human papillomavirus
TQQLQDLFK

SEQ ID NO: 854 - protein, 9 aa, Human papillomavirus
NLQGKLYYK

SEQ ID NO: 855 - protein, 10 aa, Human papillomavirus
LQGKLYYKFK

SEQ ID NO: 856 - protein, 9 aa, Human papillomavirus
GVIVMMLIR

SEQ ID NO: 857 - protein, 9 aa, Human papillomavirus
MLIRYTCGK

SEQ ID NO: 858 - protein, 9 aa, Human papillomavirus
EQMLIQPPK

SEQ ID NO: 859 - protein, 9 aa, Human papillomavirus
DSNAQAFLK

SEQ ID NO: 860 - protein, 10 aa, Human papillomavirus
AFLKSNMQAK

SEQ ID NO: 861 - protein, 10 aa, Human papillomavirus
QQMNMCQWIK

SEQ ID NO: 862 - protein, 10 aa, Human papillomavirus
CQWIKHICSK

SEQ ID NO: 863 - protein, 9 aa, Human papillomavirus
KTDEGGDWK

SEQ ID NO: 864 - protein, 10 aa, Human papillomavirus
DFISFLSYFK

SEQ ID NO: 865 - protein, 9 aa, Human papillomavirus
KLFLQGTPK

SEQ ID NO: 866 - protein, 10 aa, Human papillomavirus
VLCGPPNTGK

SEQ ID NO: 867 - protein, 10 aa, Human papillomavirus
KSCFAMSLIK

SEQ ID NO: 868 - protein, 9 aa, Human papillomavirus
CFFTRTWSR

SEQ ID NO: 869 - protein, 9 aa, Human papillomavirus
NVCVSWKYK

SEQ ID NO: 870 - protein, 9 aa, Human papillomavirus
CVSWKYKNK

SEQ ID NO: 871 - protein, 9 aa, Human papillomavirus
NTKATLLYK

SEQ ID NO: 872 - protein, 9 aa, Human papillomavirus
ILLLLIRFK

SEQ ID NO: 873 - protein, 10 aa, Human papillomavirus
LLLIRFKCSK

SEQ ID NO: 874 - protein, 10 aa, Human papillomavirus
SQACALYWFR

SEQ ID NO: 875 - protein, 9 aa, Human papillomavirus
NSNAAAFLR

SEQ ID NO: 876 - protein, 9 aa, Human papillomavirus
GVMCRHYKR

SEQ ID NO: 877 - protein, 10 aa, Human papillomavirus
EFTAFLVAFK

SEQ ID NO: 878 - protein, 9 aa, Human papillomavirus
FTAFLVAFK

SEQ ID NO: 879 - protein, 9 aa, Human papillomavirus
KQFLQGVPK

SEQ ID NO: 880 - protein, 10 aa, Human papillomavirus
KQFLQGVPKK

SEQ ID NO: 881 - protein, 10 aa, Human papillomavirus
LLCGPANTGK

SEQ ID NO: 882 - protein, 9 aa, Human papillomavirus
RLECAIYYK

SEQ ID NO: 883 - protein, 9 aa, Human papillomavirus
GQVDYYGLY

SEQ ID NO: 884 - protein, 10 aa, Human papillomavirus
GQVDYYGLYY

SEQ ID NO: 885 - protein, 9 aa, Human papillomavirus
VQFKDDAEK

SEQ ID NO: 886 - protein, 10 aa, Human papillomavirus
ILTAFNSSHK

SEQ ID NO: 887 - protein, 9 aa, Human papillomavirus
AFNSSHKGR

SEQ ID NO: 888 - protein, 10 aa, Human papillomavirus
TLKCLRYRFK

SEQ ID NO: 889 - protein, 9 aa, Human papillomavirus
LTYDSEWQR

SEQ ID NO: 890 - protein, 9 aa, Human papillomavirus
FLSQVKIPK

SEQ ID NO: 891 - protein, 10 aa, Human papillomavirus
SQIQYWQLIR

SEQ ID NO: 892 - protein, 10 aa, Human papillomavirus
QVVPAYNISK

SEQ ID NO: 893 - protein, 9 aa, Human papillomavirus
VVPAYNISK

SEQ ID NO: 894 - protein, 9 aa, Human papillomavirus
ALQGLAQSR

SEQ ID NO: 895 - protein, 10 aa, Human papillomavirus
LQGLAQSRYK

SEQ ID NO: 896 - protein, 10 aa, Human papillomavirus
TVQVYFDGNK

SEQ ID NO: 897 - protein, 9 aa, Human papillomavirus
VQVYFDGNK

SEQ ID NO: 898 - protein, 10 aa, Human papillomavirus
MTYVAWDSVY

SEQ ID NO: 899 - protein, 9 aa, Human papillomavirus
MTDAGTWDK

SEQ ID NO: 900 - protein, 9 aa, Human papillomavirus
CVSHRGLYY

SEQ ID NO: 901 - protein, 9 aa, Human papillomavirus
TVSATQLVK

SEQ ID NO: 902 - protein, 10 aa, Human papillomavirus
KQLQHTPSPY

SEQ ID NO: 903 - protein, 9 aa, Human papillomavirus
STVSVGTAK

SEQ ID NO: 904 - protein, 9 aa, Human papillomavirus
VTYHSETQR

SEQ ID NO: 905 - protein, 10 aa, Human papillomavirus
SQRLNVCQDK

SEQ ID NO: 906 - protein, 10 aa, Human papillomavirus
RLCDHIDYWK

SEQ ID NO: 907 - protein, 9 aa, Human papillomavirus
RLECVLMYK

SEQ ID NO: 908 - protein, 10 aa, Human papillomavirus
QVVPALSVSK

SEQ ID NO: 909 - protein, 9 aa, Human papillomavirus
VVPALSVSK

SEQ ID NO: 910 - protein, 10 aa, Human papillomavirus
YLTAPTGCLK

SEQ ID NO: 911 - protein, 9 aa, Human papillomavirus
NTMHYTNWK

SEQ ID NO: 912 - protein, 10 aa, Human papillomavirus
GQVNCKGIYY

SEQ ID NO: 913 - protein, 9 aa, Human papillomavirus
QVNCKGIYY

SEQ ID NO: 914 - protein, 9 aa, Human papillomavirus
YVHEGHITY

SEQ ID NO: 915 - protein, 9 aa, Human papillomavirus
ISFAGIVTK

SEQ ID NO: 916 - protein, 10 aa, Human papillomavirus
GVRRATTSTK

SEQ ID NO: 917 - protein, 9 aa, Human papillomavirus
ATTPIIHLK

SEQ ID NO: 918 - protein, 10 aa, Human papillomavirus
TLTYISTSQR

SEQ ID NO: 919 - protein, 9 aa, Human papillomavirus
LTYISTSQR

SEQ ID NO: 920 - protein, 10 aa, Human papillomavirus
DLPSQIEHWK

SEQ ID NO: 921 - protein, 10 aa, Human papillomavirus
SQIEHWKLIR

SEQ ID NO: 922 - protein, 10 aa, Human papillomavirus
LQMALETLSK

SEQ ID NO: 923 - protein, 10 aa, Human papillomavirus
WLCEPPKCFK

SEQ ID NO: 924 - protein, 10 aa, Human papillomavirus
VTVQYDNDKK

SEQ ID NO: 925 - protein, 9 aa, Human papillomavirus
ATNCTNKQR

SEQ ID NO: 926 - protein, 9 aa, Human papillomavirus
NVAPIVHLK

SEQ ID NO: 927 - protein, 10 aa, Human papillomavirus
SLKCLRYRLK

SEQ ID NO: 928 - protein, 10 aa, Human papillomavirus
STWHWTSDNK

SEQ ID NO: 929 - protein, 10 aa, Human papillomavirus
QQQMFLGTVK

SEQ ID NO: 930 - protein, 9 aa, Human papillomavirus
QQMFLGTVK

SEQ ID NO: 931 - protein, 10 aa, Human papillomavirus
SQISYWQLIR

SEQ ID NO: 932 - protein, 10 aa, Human papillomavirus
QVVPPINISK

SEQ ID NO: 933 - protein, 9 aa, Human papillomavirus
ALKGLAQSK

SEQ ID NO: 934 - protein, 9 aa, Human papillomavirus
SQCFKKGGK

SEQ ID NO: 935 - protein, 10 aa, Human papillomavirus
TVHVYFDGNK

SEQ ID NO: 936 - protein, 9 aa, Human papillomavirus
YVVWDSIYY

SEQ ID NO: 937 - protein, 10 aa, Human papillomavirus
VSYWGVYYIK

SEQ ID NO: 938 - protein, 9 aa, Human papillomavirus
VQFKSECEK

SEQ ID NO: 939 - protein, 9 aa, Human papillomavirus
TVSATQIVR

SEQ ID NO: 940 - protein, 10 aa, Human papillomavirus
LQHASTSTPK

SEQ ID NO: 941 - protein, 9 aa, Human papillomavirus
KTASVGTPK

SEQ ID NO: 942 - protein, 9 aa, Human papillomavirus
GLTEQHHGR

SEQ ID NO: 943 - protein, 10 aa, Human papillomavirus
STWHWTGCNK

SEQ ID NO: 944 - protein, 9 aa, Human papillomavirus
VTYNSEVQR

SEQ ID NO: 945 - protein, 10 aa, Human papillomavirus
AQIEHWKLTR

SEQ ID NO: 946 - protein, 10 aa, Human papillomavirus
LQLALEALNK

SEQ ID NO: 947 - protein, 9 aa, Human papillomavirus
QLALEALNK

SEQ ID NO: 948 - protein, 10 aa, Human papillomavirus
LQQTSLEMWR

SEQ ID NO: 949 - protein, 9 aa, Human papillomavirus
NTMDYTNWK

SEQ ID NO: 950 - protein, 10 aa, Human papillomavirus
GLYYWCDGEK

SEQ ID NO: 951 - protein, 10 aa, Human papillomavirus
AVHLCTETSK

SEQ ID NO: 952 - protein, 9 aa, Human papillomavirus
CTAPIIHLK

SEQ ID NO: 953 - protein, 9 aa, Human papillomavirus
TSNECTNNK

SEQ ID NO: 954 - protein, 9 aa, Human papillomavirus
KLGIVTITY

SEQ ID NO: 955 - protein, 9 aa, Human papillomavirus
ITYSDETQR

SEQ ID NO: 956 - protein, 9 aa, Human papillomavirus
ETQRQQFLK

SEQ ID NO: 957 - protein, 9 aa, Human papillomavirus
RQQFLKTVK

SEQ ID NO: 958 - protein, 10 aa, Human papillomavirus
SQRLNACQNK

SEQ ID NO: 959 - protein, 9 aa, Human papillomavirus
MVPCLQVCK

SEQ ID NO: 960 - protein, 10 aa, Human papillomavirus
WLTEPKKCFK

SEQ ID NO: 961 - protein, 10 aa, Human papillomavirus
MQYVAWKYIY

SEQ ID NO: 962 - protein, 9 aa, Human papillomavirus
YVAWKYIYY

SEQ ID NO: 963 - protein, 9 aa, Human papillomavirus
KVCSGVDYR

SEQ ID NO: 964 - protein, 9 aa, Human papillomavirus
TVNEYNTHK

SEQ ID NO: 965 - protein, 9 aa, Human papillomavirus
KTTPVVHLK

SEQ ID NO: 966 - protein, 10 aa, Human papillomavirus
TLFVDVTSTY

SEQ ID NO: 967 - protein, 9 aa, Human papillomavirus
YSIITIIYK

SEQ ID NO: 968 - protein, 9 aa, Human papillomavirus
VVYRLVWDK

SEQ ID NO: 969 - protein, 10 aa, Human papillomavirus
DLTSQIEHWK

SEQ ID NO: 970 - protein, 9 aa, Human papillomavirus
LTSQIEHWK

SEQ ID NO: 971 - protein, 9 aa, Human papillomavirus
ETLNASPYK

SEQ ID NO: 972 - protein, 10 aa, Human papillomavirus
WLSEPQKCFK

SEQ ID NO: 973 - protein, 10 aa, Human papillomavirus
GLYYIHGNEK

SEQ ID NO: 974 - protein, 9 aa, Human papillomavirus
STTETADPK

SEQ ID NO: 975 - protein, 9 aa, Human papillomavirus
TTNCTYKGR

SEQ ID NO: 976 - protein, 9 aa, Human papillomavirus
KVSPIVHLK

SEQ ID NO: 977 - protein, 10 aa, Human papillomavirus
STWHWTSDDK

SEQ ID NO: 978 - protein, 9 aa, Human papillomavirus
RQLFLNTVK

SEQ ID NO: 979 - protein, 11 aa, Human papillomavirus
RTAMFQDPQER

SEQ ID NO: 980 - protein, 10 aa, Human papillomavirus
TAMFQDPQER

SEQ ID NO: 981 - protein, 9 aa, Human papillomavirus
AMFQDPQER

SEQ ID NO: 982 - protein, 11 aa, Human papillomavirus
AMFQDPQERPR

SEQ ID NO: 983 - protein, 11 aa, Human papillomavirus
MFQDPQERPRK

SEQ ID NO: 984 - protein, 10 aa, Human papillomavirus
IHDIILECVY

SEQ ID NO: 985 - protein, 10 aa, Human papillomavirus
DIILECVYCK

SEQ ID NO: 986 - protein, 9 aa, Human papillomavirus
IILECVYCK

SEQ ID NO: 987 - protein, 9 aa, Human papillomavirus
IFLECVYCK

SEQ ID NO: 988 - protein, 9 aa, Human papillomavirus
IILECVYCR

SEQ ID NO: 989 - protein, 10 aa, Human papillomavirus
CVYCKQQLLR

SEQ ID NO: 990 - protein, 11 aa, Human papillomavirus
CVYCKQQLLRR

SEQ ID NO: 991 - protein, 9 aa, Human papillomavirus
VYDFAFRDL

SEQ ID NO: 992 - protein, 10 aa, Human papillomavirus
FAFRDLCIVY

SEQ ID NO: 993 - protein, 10 aa, Human papillomavirus
ATRDLCIVYR

SEQ ID NO: 994 - protein, 10 aa, Human papillomavirus
AFRDLCIVYK

SEQ ID NO: 995 - protein, 10 aa, Human papillomavirus
AFRDLCIVYR

SEQ ID NO: 996 - protein, 9 aa, Human papillomavirus
IVYRDGNPY

SEQ ID NO: 997 - protein, 10 aa, Human papillomavirus
DGNPYAVCDK

SEQ ID NO: 998 - protein, 9 aa, Human papillomavirus
YVVCDKCLK

SEQ ID NO: 999 - protein, 9 aa, Human papillomavirus
YAVCDKCLK

SEQ ID NO: 1000 - protein, 9 aa, Human papillomavirus
YAVCDKCLR

SEQ ID NO: 1001 - protein, 10 aa, Human papillomavirus
AVCDKCLKFR

SEQ ID NO: 1002 - protein, 10 aa, Human papillomavirus
AVCDKCLKFY

SEQ ID NO: 1003 - protein, 10 aa, Human papillomavirus
ATCDKCLKFY

SEQ ID NO: 1004 - protein, 10 aa, Human papillomavirus
KFYSKISEYK

SEQ ID NO: 1005 - protein, 10 aa, Human papillomavirus
KLYSKISEYR

SEQ ID NO: 1006 - protein, 10 aa, Human papillomavirus
KFYSKISEYR

SEQ ID NO: 1007 - protein, 10 aa, Human papillomavirus
YSKISEYRHY

SEQ ID NO: 1008 - protein, 10 aa, Human papillomavirus
KISEYRHYCR

SEQ ID NO: 1009 - protein, 10 aa, Human papillomavirus
KISEYRHYCY

SEQ ID NO: 1010 - protein, 10 aa, Human papillomavirus
KFSEYRHYCY

SEQ ID NO: 1011 - protein, 9 aa, Human papillomavirus
ISEYRHYCY

SEQ ID NO: 1012 - protein, 9 aa, Human papillomavirus
CYSLYGTTL

SEQ ID NO: 1013 - protein, 10 aa, Human papillomavirus
GTTLEQQYNK

SEQ ID NO: 1014 - protein, 9 aa, Human papillomavirus
TTLEQQYNK

SEQ ID NO: 1015 - protein, 11 aa, Human papillomavirus
DLLIRCINCQK

SEQ ID NO: 1016 - protein, 10 aa, Human papillomavirus
LLIRCINCQK

SEQ ID NO: 1017 - protein, 10 aa, Human papillomavirus
LFIRCINCQK

SEQ ID NO: 1018 - protein, 10 aa, Human papillomavirus
LLIRCINCQR

SEQ ID NO: 1019 - protein, 9 aa, Human papillomavirus
LIRCINCQK

SEQ ID NO: 1020 - protein, 10 aa, Human papillomavirus
KQRFHNIRGK

SEQ ID NO: 1021 - protein, 10 aa, Human papillomavirus
KVRFHNIRGR

SEQ ID NO: 1022 - protein, 10 aa, Human papillomavirus
KQRFHNIRGR

SEQ ID NO: 1023 - protein, 9 aa, Human papillomavirus
RFHNIRGRW

SEQ ID NO: 1024 - protein, 10 aa, Human papillomavirus
WTGRCMSCCK

SEQ ID NO: 1025 - protein, 10 aa, Human papillomavirus
WTGRCMSCCR

SEQ ID NO: 1026 - protein, 10 aa, Human papillomavirus
WFGRCMSCCR

SEQ ID NO: 1027 - protein, 10 aa, Human papillomavirus
RCMSCCRSSR

SEQ ID NO: 1028 - protein, 11 aa, Human papillomavirus
CMSCCRSSRTR

SEQ ID NO: 1029 - protein, 10 aa, Human papillomavirus
MSCCRSSRTK

SEQ ID NO: 1030 - protein, 10 aa, Human papillomavirus
MTCCRSSRTR

SEQ ID NO: 1031 - protein, 10 aa, Human papillomavirus
MSCCRSSRTR

SEQ ID NO: 1032 - protein, 9 aa, Human papillomavirus
SVCRSSRTR

SEQ ID NO: 1033 - protein, 9 aa, Human papillomavirus
SCCRSSRTK

SEQ ID NO: 1034 - protein, 9 aa, Human papillomavirus
SCCRSSRTR

SEQ ID NO: 1035 - protein, 10 aa, Human papillomavirus
STCRSSRTRR

SEQ ID NO: 1036 - protein, 10 aa, Human papillomavirus
SCCRSSRTRK

SEQ ID NO: 1037 - protein, 10 aa, Human papillomavirus
SCCRSSRTRR

SEQ ID NO: 1038 - protein, 10 aa, Human papillomavirus
MARFEDPTRR

SEQ ID NO: 1039 - protein, 11 aa, Human papillomavirus
RFEDPTRRPYK

SEQ ID NO: 1040 - protein, 9 aa, Human papillomavirus
KLPDLCTEL

SEQ ID NO: 1041 - protein, 10 aa, Human papillomavirus
LQDIEITCVY

SEQ ID NO: 1042 - protein, 10 aa, Human papillomavirus
DIEITCVYCK

SEQ ID NO: 1043 - protein, 10 aa, Human papillomavirus
DFEITCVYCK

SEQ ID NO: 1044 - protein, 10 aa, Human papillomavirus
DIEITCVYCR

SEQ ID NO: 1045 - protein, 9 aa, Human papillomavirus
VYCKTVLEL

SEQ ID NO: 1046 - protein, 11 aa, Human papillomavirus
ELTEVFEFAFK

SEQ ID NO: 1047 - protein, 10 aa, Human papillomavirus
LTEVFEFAFK

SEQ ID NO: 1048 - protein, 10 aa, Human papillomavirus
VFEFAFKDLF

SEQ ID NO: 1049 - protein, 10 aa, Human papillomavirus
FAFKDLFVVK

SEQ ID NO: 1050 - protein, 10 aa, Human papillomavirus
FTFKDLFVVY

SEQ ID NO: 1051 - protein, 10 aa, Human papillomavirus
FAFKDLFVVY

SEQ ID NO: 1052 - protein, 10 aa, Human papillomavirus
AVKDLFVVYR

SEQ ID NO: 1053 - protein, 10 aa, Human papillomavirus
AFKDLFVVYK

SEQ ID NO: 1054 - protein, 10 aa, Human papillomavirus
AFKDLFVVYR

SEQ ID NO: 1055 - protein, 10 aa, Human papillomavirus
FVVYRDSIPK

SEQ ID NO: 1056 - protein, 10 aa, Human papillomavirus
FVVYRDSIPH

SEQ ID NO: 1057 - protein, 10 aa, Human papillomavirus
FTVYRDSIPH

SEQ ID NO: 1058 - protein, 9 aa, Human papillomavirus
VVYRDSIPH

SEQ ID NO: 1059 - protein, 10 aa, Human papillomavirus
DTIPHAACHK

SEQ ID NO: 1060 - protein, 10 aa, Human papillomavirus
DSIPHAACHK

SEQ ID NO: 1061 - protein, 10 aa, Human papillomavirus
DSIPHAACHR

SEQ ID NO: 1062 - protein, 9 aa, Human papillomavirus
SIPHAACHK

SEQ ID NO: 1063 - protein, 9 aa, Human papillomavirus
SLPHAACHK

SEQ ID NO: 1064 - protein, 9 aa, Human papillomavirus
SIPHAACHR

SEQ ID NO: 1065 - protein, 10 aa, Human papillomavirus
KCIDFYSRIK

SEQ ID NO: 1066 - protein, 10 aa, Human papillomavirus
KFIDFYSRIR

SEQ ID NO: 1067 - protein, 10 aa, Human papillomavirus
YSRIRELRHY

SEQ ID NO: 1068 - protein, 10 aa, Human papillomavirus
DTVYGDTLEK

SEQ ID NO: 1069 - protein, 10 aa, Human papillomavirus
DSVYGDTLEK

SEQ ID NO: 1070 - protein, 10 aa, Human papillomavirus
DSVYGDTLER

SEQ ID NO: 1071 - protein, 9 aa, Human papillomavirus
SVYGDTLEK

SEQ ID NO: 1072 - protein, 10 aa, Human papillomavirus
NTGLYNLLIR

SEQ ID NO: 1073 - protein, 9 aa, Human papillomavirus
TGLYNLLIK

SEQ ID NO: 1074 - protein, 9 aa, Human papillomavirus
TGLYNLLIR

SEQ ID NO: 1075 - protein, 9 aa, Human papillomavirus
TFLYNLLIR

SEQ ID NO: 1076 - protein, 11 aa, Human papillomavirus
GLYNLLIRCLR

SEQ ID NO: 1077 - protein, 11 aa, Human papillomavirus
NLLIRCLRCQK

SEQ ID NO: 1078 - protein, 10 aa, Human papillomavirus
LFIRCLRCQK

SEQ ID NO: 1079 - protein, 10 aa, Human papillomavirus
LLIRCLRCQR

SEQ ID NO: 1080 - protein, 10 aa, Human papillomavirus
RVHNIAGHYR

SEQ ID NO: 1081 - protein, 10 aa, Human papillomavirus
RFHNIAGHYK

SEQ ID NO: 1082 - protein, 10 aa, Human papillomavirus
RFHNIAGHYR

SEQ ID NO: 1083 - protein, 10 aa, Human papillomavirus
RTQCHSCCNR

SEQ ID NO: 1084 - protein, 10 aa, Human papillomavirus
RGQCHSCCNK

SEQ ID NO: 1085 - protein, 10 aa, Human papillomavirus
RGQCHSCCNR

SEQ ID NO: 1086 - protein, 9 aa, Human papillomavirus
RARQERLQR

SEQ ID NO: 1087 - protein, 9 aa, Human papillomavirus
LSSALEIPY

SEQ ID NO: 1088 - protein, 10 aa, Human papillomavirus
ELRLNCVYCK

SEQ ID NO: 1089 - protein, 10 aa, Human papillomavirus
FAFTDLTIVY

SEQ ID NO: 1090 - protein, 10 aa, Human papillomavirus
ATTDLTIVYR

SEQ ID NO: 1091 - protein, 10 aa, Human papillomavirus
AFTDLTIVYK

SEQ ID NO: 1092 - protein, 10 aa, Human papillomavirus
AFTDLTIVYR

SEQ ID NO: 1093 - protein, 9 aa, Human papillomavirus
FTDLTIVYK

SEQ ID NO: 1094 - protein, 9 aa, Human papillomavirus
FVDLTIVYR

SEQ ID NO: 1095 - protein, 9 aa, Human papillomavirus
FTDLTIVYR

SEQ ID NO: 1096 - protein, 10 aa, Human papillomavirus
TIVYRDDTPH

SEQ ID NO: 1097 - protein, 9 aa, Human papillomavirus
IVYRDDTPH

SEQ ID NO: 1098 - protein, 10 aa, Human papillomavirus
DDTPHGVCTK

SEQ ID NO: 1099 - protein, 10 aa, Human papillomavirus
GVCTKCLRFY

SEQ ID NO: 1100 - protein, 10 aa, Human papillomavirus
RFYSKVSEFK

SEQ ID NO: 1101 - protein, 10 aa, Human papillomavirus
RLYSKVSEFR

SEQ ID NO: 1102 - protein, 10 aa, Human papillomavirus
RFYSKVSEFR

SEQ ID NO: 1103 - protein, 9 aa, Human papillomavirus
KVSEFRWYR

SEQ ID NO: 1104 - protein, 10 aa, Human papillomavirus
KVSEFRWYRR

SEQ ID NO: 1105 - protein, 10 aa, Human papillomavirus
KVSEFRWYRY

SEQ ID NO: 1106 - protein, 10 aa, Human papillomavirus
KFSEFRWYRY

SEQ ID NO: 1107 - protein, 10 aa, Human papillomavirus
YSVYGTTLEK

SEQ ID NO: 1108 - protein, 10 aa, Human papillomavirus
YFVYGTTLEK

SEQ ID NO: 1109 - protein, 10 aa, Human papillomavirus
YSVYGTTLER

SEQ ID NO: 1110 - protein, 9 aa, Human papillomavirus
SVYGTTLEK

SEQ ID NO: 1111 - protein, 9 aa, Human papillomavirus
SVYGTTLER

SEQ ID NO: 1112 - protein, 9 aa, Human papillomavirus
SFYGTTLEK

SEQ ID NO: 1113 - protein, 10 aa, Human papillomavirus
GTTLEKLTNK

SEQ ID NO: 1114 - protein, 10 aa, Human papillomavirus
GLTLEKLTNK

SEQ ID NO: 1115 - protein, 10 aa, Human papillomavirus
GTTLEKLTNR

SEQ ID NO: 1116 - protein, 9 aa, Human papillomavirus
TTLEKLTNK

SEQ ID NO: 1117 - protein, 9 aa, Human papillomavirus
TTLEKLTNR

SEQ ID NO: 1118 - protein, 9 aa, Human papillomavirus
TFLEKLTNK

SEQ ID NO: 1119 - protein, 10 aa, Human papillomavirus
LLIRCITCQK

SEQ ID NO: 1120 - protein, 10 aa, Human papillomavirus
LVIRCITCQR

SEQ ID NO: 1121 - protein, 10 aa, Human papillomavirus
LLIRCITCQR

SEQ ID NO: 1122 - protein, 9 aa, Human papillomavirus
LIRCITCQR

SEQ ID NO: 1123 - protein, 10 aa, Human papillomavirus
WTGRCIACWK

SEQ ID NO: 1124 - protein, 10 aa, Human papillomavirus
WVGRCIACWR

SEQ ID NO: 1125 - protein, 10 aa, Human papillomavirus
WTGRCIACWR

SEQ ID NO: 1126 - protein, 10 aa, Human papillomavirus
RTIACWRRPR

SEQ ID NO: 1127 - protein, 10 aa, Human papillomavirus
RCIACWRRPK

SEQ ID NO: 1128 - protein, 10 aa, Human papillomavirus
RCIACWRRPR

SEQ ID NO: 1129 - protein, 10 aa, Human papillomavirus
NIELQCVECK

SEQ ID NO: 1130 - protein, 8 aa, Human papillomavirus
ELQCVECK

SEQ ID NO: 1131 - protein, 10 aa, Human papillomavirus
RSEVYDFAFA

SEQ ID NO: 1132 - protein, 10 aa, Human papillomavirus
FAFADLTVVY

SEQ ID NO: 1133 - protein, 10 aa, Human papillomavirus
AVADLTVVYR

SEQ ID NO: 1134 - protein, 10 aa, Human papillomavirus
AFADLTVVYK

SEQ ID NO: 1135 - protein, 10 aa, Human papillomavirus
AFADLTVVYR

SEQ ID NO: 1136 - protein, 9 aa, Human papillomavirus
FADLTVVYR

SEQ ID NO: 1137 - protein, 9 aa, Human papillomavirus
ETNPFGICK

SEQ ID NO: 1138 - protein, 9 aa, Human papillomavirus
EGNPFGICK

SEQ ID NO: 1139 - protein, 9 aa, Human papillomavirus
EGNPFGICR

SEQ ID NO: 1140 - protein, 9 aa, Human papillomavirus
KLCLRFLSK

SEQ ID NO: 1141 - protein, 10 aa, Human papillomavirus
RFLSKISEYK

SEQ ID NO: 1142 - protein, 10 aa, Human papillomavirus
RFLSKISEYR

SEQ ID NO: 1143 - protein, 10 aa, Human papillomavirus
KISEYRHYNY

SEQ ID NO: 1144 - protein, 10 aa, Human papillomavirus
KFSEYRHYNY

SEQ ID NO: 1145 - protein, 8 aa, Human papillomavirus
NTLEQTVK

SEQ ID NO: 1146 - protein, 9 aa, Human papillomavirus
NTLEQTVKK

SEQ ID NO: 1147 - protein, 9 aa, Human papillomavirus
NTLEQTVKR

SEQ ID NO: 1148 - protein, 9 aa, Human papillomavirus
NFLEQTVKK

SEQ ID NO: 1149 - protein, 8 aa, Human papillomavirus
TLEQTVKK

SEQ ID NO: 1150 - protein, 8 aa, Human papillomavirus
PLNEILIR

SEQ ID NO: 1151 - protein, 10 aa, Human papillomavirus
ILIRCIICQK

SEQ ID NO: 1152 - protein, 10 aa, Human papillomavirus
ITIRCIICQR

SEQ ID NO: 1153 - protein, 8 aa, Human papillomavirus
PLCPQEKK

SEQ ID NO: 1154 - protein, 10 aa, Human papillomavirus
WAGRCAACWK

SEQ ID NO: 1155 - protein, 10 aa, Human papillomavirus
WVGRCAACWR

SEQ ID NO: 1156 - protein, 10 aa, Human papillomavirus
WAGRCAACWR

SEQ ID NO: 1157 - protein, 9 aa, Human papillomavirus
AGRCAACWR

SEQ ID NO: 1158 - protein, 10 aa, Human papillomavirus
RCAACWRSRR

SEQ ID NO: 1159 - protein, 10 aa, Human papillomavirus
CAACWRSRRK

SEQ ID NO: 1160 - protein, 10 aa, Human papillomavirus
CAACWRSRRR

SEQ ID NO: 1161 - protein, 10 aa, Human papillomavirus
CFACWRSRRR

SEQ ID NO: 1162 - protein, 9 aa, Human papillomavirus
AACWRSRRK

SEQ ID NO: 1163 - protein, 9 aa, Human papillomavirus
AACWRSRRR

SEQ ID NO: 1164 - protein, 9 aa, Human papillomavirus
ALCWRSRRR

SEQ ID NO: 1165 - protein, 10 aa, Human papillomavirus
DVSIACVYCK

SEQ ID NO: 1166 - protein, 10 aa, Human papillomavirus
DTSIACVYCK

SEQ ID NO: 1167 - protein, 10 aa, Human papillomavirus
DVSIACVYCR

SEQ ID NO: 1168 - protein, 9 aa, Human papillomavirus
VSIACVYCK

SEQ ID NO: 1169 - protein, 9 aa, Human papillomavirus
VFIACVYCK

SEQ ID NO: 1170 - protein, 9 aa, Human papillomavirus
VSIACVYCR

SEQ ID NO: 1171 - protein, 10 aa, Human papillomavirus
VSIACVYCKA

SEQ ID NO: 1172 - protein, 9 aa, Human papillomavirus
SIACVYCKK

SEQ ID NO: 1173 - protein, 9 aa, Human papillomavirus
SVACVYCKA

SEQ ID NO: 1174 - protein, 10 aa, Human papillomavirus
CVYCKATLEK

SEQ ID NO: 1175 - protein, 10 aa, Human papillomavirus
CVYCKATLER

SEQ ID NO: 1176 - protein, 10 aa, Human papillomavirus
CFYCKATLER

SEQ ID NO: 1177 - protein, 10 aa, Human papillomavirus
KATLERTEVY

SEQ ID NO: 1178 - protein, 10 aa, Human papillomavirus
RTEVYQFAFK

SEQ ID NO: 1179 - protein, 10 aa, Human papillomavirus
RTEVYQFAFR

SEQ ID NO: 1180 - protein, 10 aa, Human papillomavirus
RFEVYQFAFK

SEQ ID NO: 1181 - protein, 10 aa, Human papillomavirus
FAFKDLCIVY

SEQ ID NO: 1182 - protein, 10 aa, Human papillomavirus
AVKDLCIVYR

SEQ ID NO: 1183 - protein, 10 aa, Human papillomavirus
AFKDLCIVYK

SEQ ID NO: 1184 - protein, 10 aa, Human papillomavirus
AFKDLCIVYR

SEQ ID NO: 1185 - protein, 9 aa, Human papillomavirus
IVYRDCIAR

SEQ ID NO: 1186 - protein, 9 aa, Human papillomavirus
IVYRDCIAY

SEQ ID NO: 1187 - protein, 9 aa, Human papillomavirus
ILYRDCIAY

SEQ ID NO: 1188 - protein, 10 aa, Human papillomavirus
DCIAYAACHK

SEQ ID NO: 1189 - protein, 9 aa, Human papillomavirus
CTAYAACHK

SEQ ID NO: 1190 - protein, 9 aa, Human papillomavirus
CIAYAACHK

SEQ ID NO: 1191 - protein, 9 aa, Human papillomavirus
CIAYAACHR

SEQ ID NO: 1192 - protein, 10 aa, Human papillomavirus
AACHKCIDFK

SEQ ID NO: 1193 - protein, 10 aa, Human papillomavirus
ATCHKCIDFY

SEQ ID NO: 1194 - protein, 10 aa, Human papillomavirus
AACHKCIDFY

SEQ ID NO: 1195 - protein, 10 aa, Human papillomavirus
KCIDFYSRIR

SEQ ID NO: 1196 - protein, 10 aa, Human papillomavirus
NSVYGETLEK

SEQ ID NO: 1197 - protein, 10 aa, Human papillomavirus
NLVYGETLEK

SEQ ID NO: 1198 - protein, 10 aa, Human papillomavirus
NSVYGETLER

SEQ ID NO: 1199 - protein, 9 aa, Human papillomavirus
SVYGETLEK

SEQ ID NO: 1200 - protein, 9 aa, Human papillomavirus
SVYGETLER

SEQ ID NO: 1201 - protein, 9 aa, Human papillomavirus
SFYGETLEK

SEQ ID NO: 1202 - protein, 10 aa, Human papillomavirus
NTELYNLLIR

SEQ ID NO: 1203 - protein, 10 aa, Human papillomavirus
LLIRCLRCQY

SEQ ID NO: 1204 - protein, 9 aa, Human papillomavirus
LTRCLRCQK

SEQ ID NO: 1205 - protein, 9 aa, Human papillomavirus
LIRCLRCQK

SEQ ID NO: 1206 - protein, 9 aa, Human papillomavirus
LIRCLRCQR

SEQ ID NO: 1207 - protein, 10 aa, Human papillomavirus
RVHSIAGQYR

SEQ ID NO: 1208 - protein, 10 aa, Human papillomavirus
RFHSIAGQYK

SEQ ID NO: 1209 - protein, 10 aa, Human papillomavirus
RFHSIAGQYR

SEQ ID NO: 1210 - protein, 11 aa, Human papillomavirus
EVLEESVHEIR

SEQ ID NO: 1211 - protein, 10 aa, Human papillomavirus
EIRLQCVQCK

SEQ ID NO: 1212 - protein, 9 aa, Human papillomavirus
RTQCVQCKK

SEQ ID NO: 1213 - protein, 9 aa, Human papillomavirus
RLQCVQCKK

SEQ ID NO: 1214 - protein, 9 aa, Human papillomavirus
RLQCVQCKR

SEQ ID NO: 1215 - protein, 11 aa, Human papillomavirus
CVQCKKELQRR

SEQ ID NO: 1216 - protein, 9 aa, Human papillomavirus
VQCKKELQR

SEQ ID NO: 1217 - protein, 9 aa, Human papillomavirus
ELQRREVYK

SEQ ID NO: 1218 - protein, 11 aa, Human papillomavirus
EVYKFLFTDLR

SEQ ID NO: 1219 - protein, 9 aa, Human papillomavirus
FTDLRIVYR

SEQ ID NO: 1220 - protein, 11 aa, Human papillomavirus
FLFTDLRIVYR

SEQ ID NO: 1221 - protein, 10 aa, Human papillomavirus
LVTDLRIVYR

SEQ ID NO: 1222 - protein, 10 aa, Human papillomavirus
LFTDLRIVYK

SEQ ID NO: 1223 - protein, 10 aa, Human papillomavirus
LFTDLRIVYR

SEQ ID NO: 1224 - protein, 10 aa, Human papillomavirus
RIVYRDNNPY

SEQ ID NO: 1225 - protein, 9 aa, Human papillomavirus
IVYRDNNPY

SEQ ID NO: 1226 - protein, 10 aa, Human papillomavirus
CTMCLRFLSK

SEQ ID NO: 1227 - protein, 10 aa, Human papillomavirus
CIMCLRFLSK

SEQ ID NO: 1228 - protein, 10 aa, Human papillomavirus
CIMCLRFLSR

SEQ ID NO: 1229 - protein, 9 aa, Human papillomavirus
IMCLRFLSK

SEQ ID NO: 1230 - protein, 10 aa, Human papillomavirus
RFLSKISEYY

SEQ ID NO: 1231 - protein, 10 aa, Human papillomavirus
KISEYRHYQY

SEQ ID NO: 1232 - protein, 9 aa, Human papillomavirus
ISEYRHYQY

SEQ ID NO: 1233 - protein, 9 aa, Human papillomavirus
YQYSLYGKT

SEQ ID NO: 1234 - protein, 10 aa, Human papillomavirus
SLYGKTLEEK

SEQ ID NO: 1235 - protein, 10 aa, Human papillomavirus
SLYGKTLEER

SEQ ID NO: 1236 - protein, 10 aa, Human papillomavirus
SFYGKTLEER

SEQ ID NO: 1237 - protein, 9 aa, Human papillomavirus
KTLEERVKK

SEQ ID NO: 1238 - protein, 9 aa, Human papillomavirus
KTLEERVKR

SEQ ID NO: 1239 - protein, 9 aa, Human papillomavirus
KFLEERVKK

SEQ ID NO: 1240 - protein, 10 aa, Human papillomavirus
CQTPLCPEEK

SEQ ID NO: 1241 - protein, 11 aa, Human papillomavirus
QTPLCPEEKER

SEQ ID NO: 1242 - protein, 9 aa, Human papillomavirus
NIMGRWTGK

SEQ ID NO: 1243 - protein, 9 aa, Human papillomavirus
NVMGRWTGR

SEQ ID NO: 1244 - protein, 9 aa, Human papillomavirus
NIMGRWTGR

SEQ ID NO: 1245 - protein, 10 aa, Human papillomavirus
WTGRCSECWK

SEQ ID NO: 1246 - protein, 10 aa, Human papillomavirus
WTGRCSECWR

SEQ ID NO: 1247 - protein, 10 aa, Human papillomavirus
WFGRCSECWR

SEQ ID NO: 1248 - protein, 9 aa, Human papillomavirus
RCSECWRPR

SEQ ID NO: 1249 - protein, 11 aa, Human papillomavirus
EVLEIPLIDLR

SEQ ID NO: 1250 - protein, 10 aa, Human papillomavirus
DLRLSCVYCK

SEQ ID NO: 1251 - protein, 11 aa, Human papillomavirus
DLRLSCVYCKK

SEQ ID NO: 1252 - protein, 9 aa, Human papillomavirus
RLSCVYCKK

SEQ ID NO: 1253 - protein, 10 aa, Human papillomavirus
CVYCKKELTR

SEQ ID NO: 1254 - protein, 11 aa, Human papillomavirus
EVYNFACTELK

SEQ ID NO: 1255 - protein, 10 aa, Human papillomavirus
ACTELKLVYR

SEQ ID NO: 1256 - protein, 9 aa, Human papillomavirus
CTELKLVYR

SEQ ID NO: 1257 - protein, 10 aa, Human papillomavirus
KLVYRDDFPY

SEQ ID NO: 1258 - protein, 9 aa, Human papillomavirus
LVYRDDFPK

SEQ ID NO: 1259 - protein, 9 aa, Human papillomavirus
LVYRDDFPY

SEQ ID NO: 1260 - protein, 9 aa, Human papillomavirus
LTYRDDFPY

SEQ ID NO: 1261 - protein, 10 aa, Human papillomavirus
AVCRVCLLFR

SEQ ID NO: 1262 - protein, 10 aa, Human papillomavirus
AVCRVCLLFY

SEQ ID NO: 1263 - protein, 10 aa, Human papillomavirus
AFCRVCLLFY

SEQ ID NO: 1264 - protein, 9 aa, Human papillomavirus
RVCLLFYSK

SEQ ID NO: 1265 - protein, 9 aa, Human papillomavirus
RVCLLFYSR

SEQ ID NO: 1266 - protein, 9 aa, Human papillomavirus
RFCLLFYSK

SEQ ID NO: 1267 - protein, 11 aa, Human papillomavirus
RVCLLFYSKVR

SEQ ID NO: 1268 - protein, 10 aa, Human papillomavirus
VCLLFYSKVR

SEQ ID NO: 1269 - protein, 10 aa, Human papillomavirus
CLLFYSKVRK

SEQ ID NO: 1270 - protein, 10 aa, Human papillomavirus
CFLFYSKVRK

SEQ ID NO: 1271 - protein, 10 aa, Human papillomavirus
CLLFYSKVRR

SEQ ID NO: 1272 - protein, 9 aa, Human papillomavirus
LTFYSKVRK

SEQ ID NO: 1273 - protein, 9 aa, Human papillomavirus
LLFYSKVRK

SEQ ID NO: 1274 - protein, 9 aa, Human papillomavirus
LLFYSKVRR

SEQ ID NO: 1275 - protein, 11 aa, Human papillomavirus
LLFYSKVRKYR

SEQ ID NO: 1276 - protein, 10 aa, Human papillomavirus
LVYSKVRKYR

SEQ ID NO: 1277 - protein, 10 aa, Human papillomavirus
LFYSKVRKYK

SEQ ID NO: 1278 - protein, 10 aa, Human papillomavirus
LFYSKVRKYR

SEQ ID NO: 1279 - protein, 10 aa, Human papillomavirus
KVRKYRYYDY

SEQ ID NO: 1280 - protein, 10 aa, Human papillomavirus
YGATLESITK

SEQ ID NO: 1281 - protein, 9 aa, Human papillomavirus
GATLESITK

SEQ ID NO: 1282 - protein, 9 aa, Human papillomavirus
GFTLESITK

SEQ ID NO: 1283 - protein, 9 aa, Human papillomavirus
GATLESITR

SEQ ID NO: 1284 - protein, 10 aa, Human papillomavirus
GTTLESITKK

SEQ ID NO: 1285 - protein, 10 aa, Human papillomavirus
GATLESITKK

SEQ ID NO: 1286 - protein, 10 aa, Human papillomavirus
GATLESITKR

SEQ ID NO: 1287 - protein, 9 aa, Human papillomavirus
ATLESITKK

SEQ ID NO: 1288 - protein, 9 aa, Human papillomavirus
ATLESITKR

SEQ ID NO: 1289 - protein, 9 aa, Human papillomavirus
AFLESITKK

SEQ ID NO: 1290 - protein, 9 aa, Human papillomavirus
KQLCDLLIK

SEQ ID NO: 1291 - protein, 9 aa, Human papillomavirus
KVLCDLLIR

SEQ ID NO: 1292 - protein, 9 aa, Human papillomavirus
KQLCDLLIR

SEQ ID NO: 1293 - protein, 11 aa, Human papillomavirus
QLCDLLIRCYR

SEQ ID NO: 1294 - protein, 10 aa, Human papillomavirus
LCDLLIRCYK

SEQ ID NO: 1295 - protein, 10 aa, Human papillomavirus
LLDLLIRCYR

SEQ ID NO: 1296 - protein, 10 aa, Human papillomavirus
LCDLLIRCYR

SEQ ID NO: 1297 - protein, 10 aa, Human papillomavirus
KQLHCDRKRR

SEQ ID NO: 1298 - protein, 10 aa, Human papillomavirus
WTGSCLGCWK

SEQ ID NO: 1299 - protein, 10 aa, Human papillomavirus
WVGSCLGCWR

SEQ ID NO: 1300 - protein, 10 aa, Human papillomavirus
WTGSCLGCWR

SEQ ID NO: 1301 - protein, 10 aa, Human papillomavirus
ETSVHEIELK

SEQ ID NO: 1302 - protein, 9 aa, Human papillomavirus
TSVHEIELK

SEQ ID NO: 1303 - protein, 9 aa, Human papillomavirus
TFVHEIELK

SEQ ID NO: 1304 - protein, 9 aa, Human papillomavirus
TSVHEIELR

SEQ ID NO: 1305 - protein, 10 aa, Human papillomavirus
EIELKCVECK

SEQ ID NO: 1306 - protein, 10 aa, Human papillomavirus
CVECKKTLQR

SEQ ID NO: 1307 - protein, 10 aa, Human papillomavirus
RSEVYDFVFA

SEQ ID NO: 1308 - protein, 9 aa, Human papillomavirus
YTFVFADLR

SEQ ID NO: 1309 - protein, 9 aa, Human papillomavirus
YDFVFADLK

SEQ ID NO: 1310 - protein, 9 aa, Human papillomavirus
YDFVFADLR

SEQ ID NO: 1311 - protein, 10 aa, Human papillomavirus
FVFADLRIVY

SEQ ID NO: 1312 - protein, 10 aa, Human papillomavirus
VVADLRIVYR

SEQ ID NO: 1313 - protein, 10 aa, Human papillomavirus
VFADLRIVYK

SEQ ID NO: 1314 - protein, 10 aa, Human papillomavirus
VFADLRIVYR

SEQ ID NO: 1315 - protein, 9 aa, Human papillomavirus
FADLRIVYR

SEQ ID NO: 1316 - protein, 10 aa, Human papillomavirus
RDGNPFAVCK

SEQ ID NO: 1317 - protein, 9 aa, Human papillomavirus
DGNPFAVCK

SEQ ID NO: 1318 - protein, 9 aa, Human papillomavirus
AVCKVCLRL

SEQ ID NO: 1319 - protein, 9 aa, Human papillomavirus
KVCLRLLSK

SEQ ID NO: 1320 - protein, 10 aa, Human papillomavirus
RLLSKISEYK

SEQ ID NO: 1321 - protein, 10 aa, Human papillomavirus
RTLSKISEYR

SEQ ID NO: 1322 - protein, 10 aa, Human papillomavirus
RLLSKISEYR

SEQ ID NO: 1323 - protein, 10 aa, Human papillomavirus
KISEYRHYNK

SEQ ID NO: 1324 - protein, 10 aa, Human papillomavirus
KVSEYRHYNY

SEQ ID NO: 1325 - protein, 10 aa, Human papillomavirus
GDTLEQTLKK

SEQ ID NO: 1326 - protein, 9 aa, Human papillomavirus
DTLEQTLKK

SEQ ID NO: 1327 - protein, 9 aa, Human papillomavirus
DTLEQTLKR

SEQ ID NO: 1328 - protein, 9 aa, Human papillomavirus
DFLEQTLKK

SEQ ID NO: 1329 - protein, 10 aa, Human papillomavirus
IVIRCIICQR

SEQ ID NO: 1330 - protein, 10 aa, Human papillomavirus
ILIRCIICQR

SEQ ID NO: 1331 - protein, 10 aa, Human papillomavirus
ILIRCIICQY

SEQ ID NO: 1332 - protein, 9 aa, Human papillomavirus
LVRCIICQR

SEQ ID NO: 1333 - protein, 9 aa, Human papillomavirus
QEKKRHVDL

SEQ ID NO: 1334 - protein, 10 aa, Human papillomavirus
WTGRCAVCWK

SEQ ID NO: 1335 - protein, 10 aa, Human papillomavirus
WTGRCAVCWR

SEQ ID NO: 1336 - protein, 10 aa, Human papillomavirus
WLGRCAVCWR

SEQ ID NO: 1337 - protein, 9 aa, Human papillomavirus
RVAVCWRPR

SEQ ID NO: 1338 - protein, 9 aa, Human papillomavirus
RCAVCWRPK

SEQ ID NO: 1339 - protein, 9 aa, Human papillomavirus
RCAVCWRPR

SEQ ID NO: 1340 - protein, 10 aa, Human papillomavirus
RCAVCWRPRR

SEQ ID NO: 1341 - protein, 9 aa, Human papillomavirus
AVCWRPRRK

SEQ ID NO: 1342 - protein, 9 aa, Human papillomavirus
AVCWRPRRR

SEQ ID NO: 1343 - protein, 9 aa, Human papillomavirus
AFCWRPRRR

SEQ ID NO: 1344 - protein, 9 aa, Human papillomavirus
LYNLLIRCL

SEQ ID NO: 1345 - protein, 10 aa, Human papillomavirus
LSIRCLRCQK

SEQ ID NO: 1346 - protein, 10 aa, Human papillomavirus
LLIRCLRCQK

SEQ ID NO: 1347 - protein, 10 aa, Human papillomavirus
RVLSKISEYR

SEQ ID NO: 1348 - protein, 10 aa, Human papillomavirus
KISEYRHYNR

SEQ ID NO: 1349 - protein, 9 aa, Human papillomavirus
LIRCIICQK

SEQ ID NO: 1350 - protein, 9 aa, Human papillomavirus
LIRCIICQR

SEQ ID NO: 1351 - protein, 10 aa, Human papillomavirus
HGDTPTLHEY

SEQ ID NO: 1352 - protein, 11 aa, Human papillomavirus
TFCCKCDSTLR

SEQ ID NO: 1353 - protein, 10 aa, Human papillomavirus
FCCKCDSTLR

SEQ ID NO: 1354 - protein, 10 aa, Human papillomavirus
TLRLCVQSTH

SEQ ID NO: 1355 - protein, 10 aa, Human papillomavirus
GIVCPICSQK

SEQ ID NO: 1356 - protein, 10 aa, Human papillomavirus
GLVCPICSQK

SEQ ID NO: 1357 - protein, 10 aa, Human papillomavirus
GIVCPICSQR

SEQ ID NO: 1358 - protein, 9 aa, Human papillomavirus
IVCPICSQK

SEQ ID NO: 1359 - protein, 10 aa, Human papillomavirus
KATLQDIVLH

SEQ ID NO: 1360 - protein, 9 aa, Human papillomavirus
AVLQDIVLH

SEQ ID NO: 1361 - protein, 9 aa, Human papillomavirus
ATLQDIVLH

SEQ ID NO: 1362 - protein, 9 aa, Human papillomavirus
GVNHQHLPK

SEQ ID NO: 1363 - protein, 9 aa, Human papillomavirus
GVNHQHLPA

SEQ ID NO: 1364 - protein, 9 aa, Human papillomavirus
GLNHQHLPA

SEQ ID NO: 1365 - protein, 10 aa, Human papillomavirus
GVNHQHLPAK

SEQ ID NO: 1366 - protein, 10 aa, Human papillomavirus
GVNHQHLPAR

SEQ ID NO: 1367 - protein, 10 aa, Human papillomavirus
GFNHQHLPAR

SEQ ID NO: 1368 - protein, 11 aa, Human papillomavirus
GVNHQHLPARR

SEQ ID NO: 1369 - protein, 11 aa, Human papillomavirus
HLPARRAEPQR

SEQ ID NO: 1370 - protein, 9 aa, Human papillomavirus
HVMLCMCCK

SEQ ID NO: 1371 - protein, 9 aa, Human papillomavirus
HTMLCMCCK

SEQ ID NO: 1372 - protein, 9 aa, Human papillomavirus
HTMLCMCCR

SEQ ID NO: 1373 - protein, 11 aa, Human papillomavirus
MLCMCCKCEAR

SEQ ID NO: 1374 - protein, 11 aa, Human papillomavirus
LVVESSADDLR

SEQ ID NO: 1375 - protein, 10 aa, Human papillomavirus
VVESSADDLR

SEQ ID NO: 1376 - protein, 9 aa, Human papillomavirus
LSFVCPWCR

SEQ ID NO: 1377 - protein, 9 aa, Human papillomavirus
LSFVCPWCA

SEQ ID NO: 1378 - protein, 9 aa, Human papillomavirus
LFFVCPWCA

SEQ ID NO: 1379 - protein, 9 aa, Human papillomavirus
VIDSPAGQA

SEQ ID NO: 1380 - protein, 10 aa, Human papillomavirus
GQAEPDTSNY

SEQ ID NO: 1381 - protein, 9 aa, Human papillomavirus
QAEPDTSNY

SEQ ID NO: 1382 - protein, 10 aa, Human papillomavirus
NVVTFCCQCK

SEQ ID NO: 1383 - protein, 10 aa, Human papillomavirus
NIVTFCCQCK

SEQ ID NO: 1384 - protein, 10 aa, Human papillomavirus
NIVTFCCQCR

SEQ ID NO: 1385 - protein, 9 aa, Human papillomavirus
IVTFCCQCK

SEQ ID NO: 1386 - protein, 10 aa, Human papillomavirus
FCCQCKSTLR

SEQ ID NO: 1387 - protein, 10 aa, Human papillomavirus
GIVCPNCSTR

SEQ ID NO: 1388 - protein, 9 aa, Human papillomavirus
IVCPNCSTR

SEQ ID NO: 1389 - protein, 9 aa, Human papillomavirus
LKEYVLDLY

SEQ ID NO: 1390 - protein, 10 aa, Human papillomavirus
DLYPEPTDLY

SEQ ID NO: 1391 - protein, 10 aa, Human papillomavirus
GQAQPATADY

SEQ ID NO: 1392 - protein, 10 aa, Human papillomavirus
QAQPATADYY

SEQ ID NO: 1393 - protein, 9 aa, Human papillomavirus
AQPATADYK

SEQ ID NO: 1394 - protein, 9 aa, Human papillomavirus
AQPATADYY

SEQ ID NO: 1395 - protein, 9 aa, Human papillomavirus
ALPATADYY

SEQ ID NO: 1396 - protein, 10 aa, Human papillomavirus
ADYYIVTCCH

SEQ ID NO: 1397 - protein, 8 aa, Human papillomavirus
HTCNTTVR

SEQ ID NO: 1398 - protein, 10 aa, Human papillomavirus
TVRLCVNSTA

SEQ ID NO: 1399 - protein, 10 aa, Human papillomavirus
TVNIVCPTCA

SEQ ID NO: 1400 - protein, 10 aa, Human papillomavirus
GVSHAQLPAK

SEQ ID NO: 1401 - protein, 10 aa, Human papillomavirus
GVSHAQLPAR

SEQ ID NO: 1402 - protein, 10 aa, Human papillomavirus
GLSHAQLPAR

SEQ ID NO: 1403 - protein, 9 aa, Human papillomavirus
VSHAQLPAK

SEQ ID NO: 1404 - protein, 9 aa, Human papillomavirus
VVHAQLPAR

SEQ ID NO: 1405 - protein, 9 aa, Human papillomavirus
VSHAQLPAR

SEQ ID NO: 1406 - protein, 10 aa, Human papillomavirus
TVESSAEDLR

SEQ ID NO: 1407 - protein, 9 aa, Human papillomavirus
ATLQDIVLK

SEQ ID NO: 1408 - protein, 9 aa, Human papillomavirus
GVDRPDGQK

SEQ ID NO: 1409 - protein, 9 aa, Human papillomavirus
GVDRPDGQA

SEQ ID NO: 1410 - protein, 9 aa, Human papillomavirus
GTDRPDGQA

SEQ ID NO: 1411 - protein, 10 aa, Human papillomavirus
GQAEQATSNY

SEQ ID NO: 1412 - protein, 10 aa, Human papillomavirus
QAEQATSNYY

SEQ ID NO: 1413 - protein, 10 aa, Human papillomavirus
ATSNYYIVTY

SEQ ID NO: 1414 - protein, 9 aa, Human papillomavirus
TLRLCIHST

SEQ ID NO: 1415 - protein, 10 aa, Human papillomavirus
TLRLCIHSTA

SEQ ID NO: 1416 - protein, 11 aa, Human papillomavirus
TLQVVCPGCAR

SEQ ID NO: 1417 - protein, 10 aa, Human papillomavirus
LQVVCPGCAR

SEQ ID NO: 1418 - protein, 9 aa, Human papillomavirus
QVVCPGCAR

SEQ ID NO: 1419 - protein, 9 aa, Human papillomavirus
VVLELTPQT

SEQ ID NO: 1420 - protein, 9 aa, Human papillomavirus
HLQERPQQA

SEQ ID NO: 1421 - protein, 9 aa, Human papillomavirus
QQARQAKQK

SEQ ID NO: 1422 - protein, 9 aa, Human papillomavirus
QQARQAKQH

SEQ ID NO: 1423 - protein, 9 aa, Human papillomavirus
QLARQAKQH

SEQ ID NO: 1424 - protein, 9 aa, Human papillomavirus
KQHTCYLIR

SEQ ID NO: 1425 - protein, 9 aa, Human papillomavirus
KQHTCYLIH

SEQ ID NO: 1426 - protein, 9 aa, Human papillomavirus
KFHTCYLIH

SEQ ID NO: 1427 - protein, 11 aa, Human papillomavirus
YLIHVPCCECK

SEQ ID NO: 1428 - protein, 10 aa, Human papillomavirus
LIHVPCCECK

SEQ ID NO: 1429 - protein, 10 aa, Human papillomavirus
LFHVPCCECK

SEQ ID NO: 1430 - protein, 10 aa, Human papillomavirus
LIHVPCCECR

SEQ ID NO: 1431 - protein, 9 aa, Human papillomavirus
CECKFVVQL

SEQ ID NO: 1432 - protein, 11 aa, Human papillomavirus
FVVQLDIQSTK

SEQ ID NO: 1433 - protein, 10 aa, Human papillomavirus
VVQLDIQSTK

SEQ ID NO: 1434 - protein, 10 aa, Human papillomavirus
VLQLDIQSTK

SEQ ID NO: 1435 - protein, 10 aa, Human papillomavirus
VVQLDIQSTR

SEQ ID NO: 1436 - protein, 9 aa, Human papillomavirus
VTLDIQSTK

SEQ ID NO: 1437 - protein, 9 aa, Human papillomavirus
VQLDIQSTK

SEQ ID NO: 1438 - protein, 9 aa, Human papillomavirus
VQLDIQSTR

SEQ ID NO: 1439 - protein, 9 aa, Human papillomavirus
VVQQLLMGA

SEQ ID NO: 1440 - protein, 10 aa, Human papillomavirus
GQAQPATANY

SEQ ID NO: 1441 - protein, 10 aa, Human papillomavirus
QAQPATANYY

SEQ ID NO: 1442 - protein, 9 aa, Human papillomavirus
AQPATANYY

SEQ ID NO: 1443 - protein, 10 aa, Human papillomavirus
CCYTCGTTVR

SEQ ID NO: 1444 - protein, 9 aa, Human papillomavirus
QLLMGTCTI

SEQ ID NO: 1445 - protein, 9 aa, Human papillomavirus
LYGVSFSEL

SEQ ID NO: 1446 - protein, 10 aa, Human papillomavirus
YWYKTGISNI

SEQ ID NO: 1447 - protein, 9 aa, Human papillomavirus
WYKTGISNI

SEQ ID NO: 1448 - protein, 9 aa, Human papillomavirus
VYGDTPEWI

SEQ ID NO: 1449 - protein, 9 aa, Human papillomavirus
EWIQRQTVL

SEQ ID NO: 1450 - protein, 9 aa, Human papillomavirus
SFNDCTFEL

SEQ ID NO: 1451 - protein, 9 aa, Human papillomavirus
CFVNSKSHF

SEQ ID NO: 1452 - protein, 9 aa, Human papillomavirus
RWPYLHNRL

SEQ ID NO: 1453 - protein, 10 aa, Human papillomavirus
PYLHNRLVVF

SEQ ID NO: 1454 - protein, 10 aa, Human papillomavirus
VFTFPNEFPF

SEQ ID NO: 1455 - protein, 9 aa, Human papillomavirus
SFTDLVRNF

SEQ ID NO: 1456 - protein, 9 aa, Human papillomavirus
WYRTGISNI

SEQ ID NO: 1457 - protein, 9 aa, Human papillomavirus
KYLKDCATM

SEQ ID NO: 1458 - protein, 10 aa, Human papillomavirus
SYFGMSFIHF

SEQ ID NO: 1459 - protein, 9 aa, Human papillomavirus
YFGMSFIHF

SEQ ID NO: 1460 - protein, 9 aa, Human papillomavirus
SFVNSTSHF

SEQ ID NO: 1461 - protein, 9 aa, Human papillomavirus
CWTYFDTYM

SEQ ID NO: 1462 - protein, 10 aa, Human papillomavirus
PYLESRITVF

SEQ ID NO: 1463 - protein, 10 aa, Human papillomavirus
VFEFPNAFPF

SEQ ID NO: 1464 - protein, 10 aa, Human papillomavirus
LYGVSFMELI

SEQ ID NO: 1465 - protein, 9 aa, Human papillomavirus
WYRTGMSNI

SEQ ID NO: 1466 - protein, 9 aa, Human papillomavirus
VYGETPEWI

SEQ ID NO: 1467 - protein, 9 aa, Human papillomavirus
EWIERQTVL

SEQ ID NO: 1468 - protein, 9 aa, Human papillomavirus
SFNDTTFDL

SEQ ID NO: 1469 - protein, 10 aa, Human papillomavirus
SYFGMSLISF

SEQ ID NO: 1470 - protein, 9 aa, Human papillomavirus
YFGMSLISF

SEQ ID NO: 1471 - protein, 9 aa, Human papillomavirus
SYANSKSHF

SEQ ID NO: 1472 - protein, 9 aa, Human papillomavirus
CWHYIDNYL

SEQ ID NO: 1473 - protein, 9 aa, Human papillomavirus
RWPYLHSRL

SEQ ID NO: 1474 - protein, 10 aa, Human papillomavirus
PYLHSRLVVF

SEQ ID NO: 1475 - protein, 10 aa, Human papillomavirus
VFTFPNPFPF

SEQ ID NO: 1476 - protein, 9 aa, Human papillomavirus
AYGISFMEL

SEQ ID NO: 1477 - protein, 10 aa, Human papillomavirus
YWFRTAMSNI

SEQ ID NO: 1478 - protein, 9 aa, Human papillomavirus
EWIDRLTVL

SEQ ID NO: 1479 - protein, 9 aa, Human papillomavirus
NWRPIVQLL

SEQ ID NO: 1480 - protein, 10 aa, Human papillomavirus
SYFGMSLIQF

SEQ ID NO: 1481 - protein, 10 aa, Human papillomavirus
PYLHSRLTVF

SEQ ID NO: 1482 - protein, 10 aa, Human papillomavirus
VFEFKNPFPF

SEQ ID NO: 1483 - protein, 9 aa, Human papillomavirus
VYAINDENW

SEQ ID NO: 1484 - protein, 9 aa, Human papillomavirus
FFSRTWCKL

SEQ ID NO: 1485 - protein, 9 aa, Human papillomavirus
KYLKDCAVM

SEQ ID NO: 1486 - protein, 9 aa, Human papillomavirus
SFVNSNSHF

SEQ ID NO: 1487 - protein, 9 aa, Human papillomavirus
CWTYFDNYM

SEQ ID NO: 1488 - protein, 10 aa, Human papillomavirus
PYLESRVTVF

SEQ ID NO: 1489 - protein, 10 aa, Human papillomavirus
VFTFPHAFPF

SEQ ID NO: 1490 - protein, 9 aa, Human papillomavirus
AYDSGTDLI

SEQ ID NO: 1491 - protein, 9 aa, Human papillomavirus
VYGTTPEWI

SEQ ID NO: 1492 - protein, 9 aa, Human papillomavirus
EWIEQQTVL

SEQ ID NO: 1493 - protein, 9 aa, Human papillomavirus
EFTAFLDAF

SEQ ID NO: 1494 - protein, 9 aa, Human papillomavirus
AFLDAFKKF

SEQ ID NO: 1495 - protein, 10 aa, Human papillomavirus
SYFGMSLIRF

SEQ ID NO: 1496 - protein, 9 aa, Human papillomavirus
SYVNSKSHF

SEQ ID NO: 1497 - protein, 10 aa, Human papillomavirus
VFHFKNPFPF

SEQ ID NO: 1498 - protein, 9 aa, Human papillomavirus
IYEINNENW

SEQ ID NO: 1499 - protein, 9 aa, Human papillomavirus
LYYKFKEVY

SEQ ID NO: 1500 - protein, 9 aa, Human papillomavirus
VYGIPFSEL

SEQ ID NO: 1501 - protein, 9 aa, Human papillomavirus
HMQCLTCTW

SEQ ID NO: 1502 - protein, 9 aa, Human papillomavirus
FYKTAMSNI

SEQ ID NO: 1503 - protein, 9 aa, Human papillomavirus
KYVKDCGIM

SEQ ID NO: 1504 - protein, 9 aa, Human papillomavirus
DFISFLSYF

SEQ ID NO: 1505 - protein, 9 aa, Human papillomavirus
SFLSYFKLF

SEQ ID NO: 1506 - protein, 10 aa, Human papillomavirus
SFLSYFKLFL

SEQ ID NO: 1507 - protein, 9 aa, Human papillomavirus
FFQGSVISF

SEQ ID NO: 1508 - protein, 9 aa, Human papillomavirus
SFVNSQSHF

SEQ ID NO: 1509 - protein, 9 aa, Human papillomavirus
CWKYIDDYL

SEQ ID NO: 1510 - protein, 10 aa, Human papillomavirus
RYLHSRMLVF

SEQ ID NO: 1511 - protein, 9 aa, Human papillomavirus
VYELSNVNW

SEQ ID NO: 1512 - protein, 9 aa, Human papillomavirus
AYGVSFMEL

SEQ ID NO: 1513 - protein, 9 aa, Human papillomavirus
NWRPIVQFL

SEQ ID NO: 1514 - protein, 9 aa, Human papillomavirus
EFTAFLVAF

SEQ ID NO: 1515 - protein, 10 aa, Human papillomavirus
SYFGMSLIHF

SEQ ID NO: 1516 - protein, 9 aa, Human papillomavirus
YFGMSLIHF

SEQ ID NO: 1517 - protein, 10 aa, Human papillomavirus
VFEFNNPFPF

SEQ ID NO: 1518 - protein, 9 aa, Human papillomavirus
VYKINDENW

SEQ ID NO: 1519 - protein, 9 aa, Human papillomavirus
HYENDSTDL

SEQ ID NO: 1520 - protein, 10 aa, Human papillomavirus
IYYKAREMGF

SEQ ID NO: 1521 - protein, 9 aa, Human papillomavirus
YYKAREMGF

SEQ ID NO: 1522 - protein, 9 aa, Human papillomavirus
QYSNEKWTL

SEQ ID NO: 1523 - protein, 9 aa, Human papillomavirus
KWTLQDVSL

SEQ ID NO: 1524 - protein, 9 aa, Human papillomavirus
HYTNWTHIY

SEQ ID NO: 1525 - protein, 10 aa, Human papillomavirus
RYRFKKHCTL

SEQ ID NO: 1526 - protein, 9 aa, Human papillomavirus
LYTAVSSTW

SEQ ID NO: 1527 - protein, 9 aa, Human papillomavirus
HYENDSKDI

SEQ ID NO: 1528 - protein, 9 aa, Human papillomavirus
RYKTEDWTL

SEQ ID NO: 1529 - protein, 9 aa, Human papillomavirus
YYMTDAGTW

SEQ ID NO: 1530 - protein, 9 aa, Human papillomavirus
GYNTFYIEF

SEQ ID NO: 1531 - protein, 9 aa, Human papillomavirus
HYRDISSTW

SEQ ID NO: 1532 - protein, 9 aa, Human papillomavirus
HYENDSKRL

SEQ ID NO: 1533 - protein, 9 aa, Human papillomavirus
HYTNWKFIY

SEQ ID NO: 1534 - protein, 9 aa, Human papillomavirus
VFSSDEISF

SEQ ID NO: 1535 - protein, 9 aa, Human papillomavirus
LYTAKQMGF

SEQ ID NO: 1536 - protein, 9 aa, Human papillomavirus
QYSTSQWTL

SEQ ID NO: 1537 - protein, 9 aa, Human papillomavirus
YFKEDAAKY

SEQ ID NO: 1538 - protein, 9 aa, Human papillomavirus
LYSSMSSTW

SEQ ID NO: 1539 - protein, 9 aa, Human papillomavirus
KMQTPKESL

SEQ ID NO: 1540 - protein, 9 aa, Human papillomavirus
KYNNEEWTL

SEQ ID NO: 1541 - protein, 9 aa, Human papillomavirus
YYITETGIW

SEQ ID NO: 1542 - protein, 9 aa, Human papillomavirus
KYADHYSEI

SEQ ID NO: 1543 - protein, 9 aa, Human papillomavirus
HYSEISSTW

SEQ ID NO: 1544 - protein, 9 aa, Human papillomavirus
QYSTDGWTL

SEQ ID NO: 1545 - protein, 10 aa, Human papillomavirus
KYFKKHGYTI

SEQ ID NO: 1546 - protein, 9 aa, Human papillomavirus
YFKKHGYTI

SEQ ID NO: 1547 - protein, 9 aa, Human papillomavirus
YYWCDGEKI

SEQ ID NO: 1548 - protein, 9 aa, Human papillomavirus
LYVQISSTW

SEQ ID NO: 1549 - protein, 9 aa, Human papillomavirus
YYKARENDI

SEQ ID NO: 1550 - protein, 9 aa, Human papillomavirus
IYNNEEWTL

SEQ ID NO: 1551 - protein, 9 aa, Human papillomavirus
QYVAWKYIY

SEQ ID NO: 1552 - protein, 9 aa, Human papillomavirus
RFQKYKTLF

SEQ ID NO: 1553 - protein, 9 aa, Human papillomavirus
LFVDVTSTY

SEQ ID NO: 1554 - protein, 9 aa, Human papillomavirus
NYSIITIIY

SEQ ID NO: 1555 - protein, 9 aa, Human papillomavirus
PYKTDEWTL

SEQ ID NO: 1556 - protein, 9 aa, Human papillomavirus
EWTLQQTSL

SEQ ID NO: 1557 - protein, 9 aa, Human papillomavirus
LYCNMSSTW

SEQ ID NO: 1558 - protein, 9 aa, Human papillomavirus
VYDFAFRDL

SEQ ID NO: 1559 - protein, 11 aa, Human papillomavirus
VYDFAFRDLCI

SEQ ID NO: 1560 - protein, 9 aa, Human papillomavirus
VYDFAFRDF

SEQ ID NO: 1561 - protein, 9 aa, Human papillomavirus
DFAFRDLCI

SEQ ID NO: 1562 - protein, 9 aa, Human papillomavirus
AFRDLCIVY

SEQ ID NO: 1563 - protein, 9 aa, Human papillomavirus
AFRDLCIVF

SEQ ID NO: 1564 - protein, 9 aa, Human papillomavirus
AYRDLCIVY

SEQ ID NO: 1565 - protein, 9 aa, Human papillomavirus
IVYRDGNPY

SEQ ID NO: 1566 - protein, 9 aa, Human papillomavirus
PYAVCDKCL

SEQ ID NO: 1567 - protein, 11 aa, Human papillomavirus
PYAVCDKCLKF

SEQ ID NO: 1568 - protein, 9 aa, Human papillomavirus
PYAVCDKCF

SEQ ID NO: 1569 - protein, 9 aa, Human papillomavirus
KFYSKISEY

SEQ ID NO: 1570 - protein, 9 aa, Human papillomavirus
KFYSKISEF

SEQ ID NO: 1571 - protein, 9 aa, Human papillomavirus
KYYSKISEY

SEQ ID NO: 1572 - protein, 10 aa, Human papillomavirus
YSKISEYRHY

SEQ ID NO: 1573 - protein, 9 aa, Human papillomavirus
EYRHYCYSL

SEQ ID NO: 1574 - protein, 9 aa, Human papillomavirus
CYSLYGTTL

SEQ ID NO: 1575 - protein, 9 aa, Human papillomavirus
CYSLYGTTF

SEQ ID NO: 1576 - protein, 10 aa, Human papillomavirus
LYGTTLEQQY

SEQ ID NO: 1577 - protein, 9 aa, Human papillomavirus
QYNKPLCDL

SEQ ID NO: 1578 - protein, 10 aa, Human papillomavirus
QYNKPLCDLL

SEQ ID NO: 1579 - protein, 11 aa, Human papillomavirus
QYNKPLCDLLI

SEQ ID NO: 1580 - protein, 10 aa, Human papillomavirus
QYNKPLCDLF

SEQ ID NO: 1581 - protein, 9 aa, Human papillomavirus
RFHNIRGRW

SEQ ID NO: 1582 - protein, 9 aa, Human papillomavirus
RFHNIRGRF

SEQ ID NO: 1583 - protein, 9 aa, Human papillomavirus
RYHNIRGRW

SEQ ID NO: 1584 - protein, 9 aa, Human papillomavirus
FEDPTRRPY

SEQ ID NO: 1585 - protein, 9 aa, Human papillomavirus
KLPDLCTEL

SEQ ID NO: 1586 - protein, 10 aa, Human papillomavirus
LQDIEITCVY

SEQ ID NO: 1587 - protein, 9 aa, Human papillomavirus
VYCKTVLEL

SEQ ID NO: 1588 - protein, 9 aa, Human papillomavirus
VYCKTVLEF

SEQ ID NO: 1589 - protein, 9 aa, Human papillomavirus
VFEFAFKDL

SEQ ID NO: 1590 - protein, 10 aa, Human papillomavirus
VFEFAFKDLF

SEQ ID NO: 1591 - protein, 10 aa, Human papillomavirus
VYEFAFKDLF

SEQ ID NO: 1592 - protein, 8 aa, Human papillomavirus
EFAFKDLF

SEQ ID NO: 1593 - protein, 9 aa, Human papillomavirus
AFKDLFVVY

SEQ ID NO: 1594 - protein, 9 aa, Human papillomavirus
AFKDLFVVF

SEQ ID NO: 1595 - protein, 9 aa, Human papillomavirus
AYKDLFVVY

SEQ ID NO: 1596 - protein, 9 aa, Human papillomavirus
LFVVYRDSI

SEQ ID NO: 1597 - protein, 9 aa, Human papillomavirus
LFVVYRDSF

SEQ ID NO: 1598 - protein, 9 aa, Human papillomavirus
LYVVYRDSI

SEQ ID NO: 1599 - protein, 10 aa, Human papillomavirus
YSRIRELRHY

SEQ ID NO: 1600 - protein, 9 aa, Human papillomavirus
VYGDTLEKL

SEQ ID NO: 1601 - protein, 9 aa, Human papillomavirus
LYNLLIRCF

SEQ ID NO: 1602 - protein, 9 aa, Human papillomavirus
RFHNIAGHY

SEQ ID NO: 1603 - protein, 9 aa, Human papillomavirus
RFHNIAGHF

SEQ ID NO: 1604 - protein, 9 aa, Human papillomavirus
RYHNIAGHY

SEQ ID NO: 1605 - protein, 10 aa, Human papillomavirus
YDELRLNCVY

SEQ ID NO: 1606 - protein, 9 aa, Human papillomavirus
DFAFTDLTI

SEQ ID NO: 1607 - protein, 9 aa, Human papillomavirus
AFTDLTIVY

SEQ ID NO: 1608 - protein, 9 aa, Human papillomavirus
RFYSKVSEF

SEQ ID NO: 1609 - protein, 8 aa, Human papillomavirus
FYSKVSEF

SEQ ID NO: 1610 - protein, 10 aa, Human papillomavirus
FYSKVSEFRW

SEQ ID NO: 1611 - protein, 10 aa, Human papillomavirus
FYSKVSEFRF

SEQ ID NO: 1612 - protein, 10 aa, Human papillomavirus
EFRWYRYSVY

SEQ ID NO: 1613 - protein, 9 aa, Human papillomavirus
RYSVYGTTL

SEQ ID NO: 1614 - protein, 9 aa, Human papillomavirus
VYGTTLEKL

SEQ ID NO: 1615 - protein, 9 aa, Human papillomavirus
VYGTTLEKF

SEQ ID NO: 1616 - protein, 9 aa, Human papillomavirus
RFHNIGGRW

SEQ ID NO: 1617 - protein, 10 aa, Human papillomavirus
RWTGRCIACW

SEQ ID NO: 1618 - protein, 9 aa, Human papillomavirus
VYDFAFADL

SEQ ID NO: 1619 - protein, 9 aa, Human papillomavirus
AFADLTVVY

SEQ ID NO: 1620 - protein, 9 aa, Human papillomavirus
AFADLTVVF

SEQ ID NO: 1621 - protein, 9 aa, Human papillomavirus
AYADLTVVY

SEQ ID NO: 1622 - protein, 8 aa, Human papillomavirus
VYREGNPF

SEQ ID NO: 1623 - protein, 10 aa, Human papillomavirus
VYREGNPFGI

SEQ ID NO: 1624 - protein, 10 aa, Human papillomavirus
VYREGNPFGF

SEQ ID NO: 1625 - protein, 9 aa, Human papillomavirus
PFGICKLCL

SEQ ID NO: 1626 - protein, 11 aa, Human papillomavirus
PFGICKLCLRF

SEQ ID NO: 1627 - protein, 9 aa, Human papillomavirus
RFLSKISEY

SEQ ID NO: 1628 - protein, 9 aa, Human papillomavirus
RYLSKISEY

SEQ ID NO: 1629 - protein, 10 aa, Human papillomavirus
EYRHYNYSVY

SEQ ID NO: 1630 - protein, 9 aa, Human papillomavirus
NYSVYGNTL

SEQ ID NO: 1631 - protein, 9 aa, Human papillomavirus
NYSVYGNTF

SEQ ID NO: 1632 - protein, 9 aa, Human papillomavirus
RFHNISGRW

SEQ ID NO: 1633 - protein, 9 aa, Human papillomavirus
RYHNISGRW

SEQ ID NO: 1634 - protein, 10 aa, Human papillomavirus
RWAGRCAACW

SEQ ID NO: 1635 - protein, 10 aa, Human papillomavirus
RFDDPKQRPY

SEQ ID NO: 1636 - protein, 9 aa, Human papillomavirus
FDDPKQRPY

SEQ ID NO: 1637 - protein, 9 aa, Human papillomavirus
VYQFAFKDL

SEQ ID NO: 1638 - protein, 11 aa, Human papillomavirus
VYQFAFKDLCI

SEQ ID NO: 1639 - protein, 9 aa, Human papillomavirus
QFAFKDLCI

SEQ ID NO: 1640 - protein, 9 aa, Human papillomavirus
AFKDLCIVY

SEQ ID NO: 1641 - protein, 9 aa, Human papillomavirus
AFKDLCIVF

SEQ ID NO: 1642 - protein, 9 aa, Human papillomavirus
AYKDLCIVY

SEQ ID NO: 1643 - protein, 9 aa, Human papillomavirus
AYAACHKCI

SEQ ID NO: 1644 - protein, 11 aa, Human papillomavirus
AYAACHKCIDF

SEQ ID NO: 1645 - protein, 9 aa, Human papillomavirus
AYAACHKCF

SEQ ID NO: 1646 - protein, 10 aa, Human papillomavirus
FYSRIRELRF

SEQ ID NO: 1647 - protein, 9 aa, Human papillomavirus
VYGETLEKI

SEQ ID NO: 1648 - protein, 9 aa, Human papillomavirus
VYGETLEKF

SEQ ID NO: 1649 - protein, 9 aa, Human papillomavirus
RFHSIAGQY

SEQ ID NO: 1650 - protein, 9 aa, Human papillomavirus
RFHSIAGQF

SEQ ID NO: 1651 - protein, 9 aa, Human papillomavirus
RYHSIAGQY

SEQ ID NO: 1652 - protein, 10 aa, Human papillomavirus
KKELQRREVY

SEQ ID NO: 1653 - protein, 9 aa, Human papillomavirus
VYKFLFTDL

SEQ ID NO: 1654 - protein, 11 aa, Human papillomavirus
VYKFLFTDLRI

SEQ ID NO: 1655 - protein, 9 aa, Human papillomavirus
KFLFTDLRI

SEQ ID NO: 1656 - protein, 9 aa, Human papillomavirus
KFLFTDLRF

SEQ ID NO: 1657 - protein, 9 aa, Human papillomavirus
KYLFTDLRI

SEQ ID NO: 1658 - protein, 9 aa, Human papillomavirus
LFTDLRIVY

SEQ ID NO: 1659 - protein, 9 aa, Human papillomavirus
LFTDLRIVF

SEQ ID NO: 1660 - protein, 9 aa, Human papillomavirus
LYTDLRIVY

SEQ ID NO: 1661 - protein, 9 aa, Human papillomavirus
PYGVCIMCL

SEQ ID NO: 1662 - protein, 11 aa, Human papillomavirus
PYGVCIMCLRF

SEQ ID NO: 1663 - protein, 9 aa, Human papillomavirus
PYGVCIMCF

SEQ ID NO: 1664 - protein, 9 aa, Human papillomavirus
RFLSKISEF

SEQ ID NO: 1665 - protein, 9 aa, Human papillomavirus
EYRHYQYSL

SEQ ID NO: 1666 - protein, 10 aa, Human papillomavirus
EYRHYQYSLY

SEQ ID NO: 1667 - protein, 9 aa, Human papillomavirus
EYRHYQYSF

SEQ ID NO: 1668 - protein, 9 aa, Human papillomavirus
QYSLYGKTL

SEQ ID NO: 1669 - protein, 9 aa, Human papillomavirus
RFHNIMGRW

SEQ ID NO: 1670 - protein, 9 aa, Human papillomavirus
RFHNIMGRF

SEQ ID NO: 1671 - protein, 9 aa, Human papillomavirus
RYHNIMGRW

SEQ ID NO: 1672 - protein, 10 aa, Human papillomavirus
RWTGRCSECW

SEQ ID NO: 1673 - protein, 10 aa, Human papillomavirus
LIDLRLSCVY

SEQ ID NO: 1674 - protein, 10 aa, Human papillomavirus
KKELTRAEVY

SEQ ID NO: 1675 - protein, 9 aa, Human papillomavirus
VYNFACTEL

SEQ ID NO: 1676 - protein, 9 aa, Human papillomavirus
VYNFACTEF

SEQ ID NO: 1677 - protein, 9 aa, Human papillomavirus
NFACTELKL

SEQ ID NO: 1678 - protein, 9 aa, Human papillomavirus
NFACTELKF

SEQ ID NO: 1679 - protein, 9 aa, Human papillomavirus
NYACTELKL

SEQ ID NO: 1680 - protein, 9 aa, Human papillomavirus
PYAVCRVCL

SEQ ID NO: 1681 - protein, 10 aa, Human papillomavirus
PYAVCRVCLL

SEQ ID NO: 1682 - protein, 11 aa, Human papillomavirus
PYAVCRVCLLF

SEQ ID NO: 1683 - protein, 9 aa, Human papillomavirus
PYAVCRVCF

SEQ ID NO: 1684 - protein, 10 aa, Human papillomavirus
PYAVCRVCLF

SEQ ID NO: 1685 - protein, 9 aa, Human papillomavirus
LFYSKVRKY

SEQ ID NO: 1686 - protein, 9 aa, Human papillomavirus
LFYSKVRKF

SEQ ID NO: 1687 - protein, 9 aa, Human papillomavirus
LYYSKVRKY

SEQ ID NO: 1688 - protein, 10 aa, Human papillomavirus
FYSKVRKYRF

SEQ ID NO: 1689 - protein, 10 aa, Human papillomavirus
YSKVRKYRYY

SEQ ID NO: 1690 - protein, 10 aa, Human papillomavirus
KYRYYDYSVY

SEQ ID NO: 1691 - protein, 9 aa, Human papillomavirus
DYSVYGATL

SEQ ID NO: 1692 - protein, 9 aa, Human papillomavirus
VYGATLESI

SEQ ID NO: 1693 - protein, 9 aa, Human papillomavirus
RFHLIAHGW

SEQ ID NO: 1694 - protein, 10 aa, Human papillomavirus
GWTGSCLGCW

SEQ ID NO: 1695 - protein, 9 aa, Human papillomavirus
VYDFVFADL

SEQ ID NO: 1696 - protein, 11 aa, Human papillomavirus
VYDFVFADLRI

SEQ ID NO: 1697 - protein, 9 aa, Human papillomavirus
VYDFVFADF

SEQ ID NO: 1698 - protein, 9 aa, Human papillomavirus
YDFVFADLR

SEQ ID NO: 1699 - protein, 9 aa, Human papillomavirus
DFVFADLRI

SEQ ID NO: 1700 - protein, 9 aa, Human papillomavirus
VFADLRIVY

SEQ ID NO: 1701 - protein, 9 aa, Human papillomavirus
VFADLRIVF

SEQ ID NO: 1702 - protein, 9 aa, Human papillomavirus
VYADLRIVY

SEQ ID NO: 1703 - protein, 8 aa, Human papillomavirus
VYRDGNPF

SEQ ID NO: 1704 - protein, 9 aa, Human papillomavirus
PFAVCKVCL

SEQ ID NO: 1705 - protein, 9 aa, Human papillomavirus
EYRHYNYSL

SEQ ID NO: 1706 - protein, 10 aa, Human papillomavirus
EYRHYNYSLY

SEQ ID NO: 1707 - protein, 9 aa, Human papillomavirus
NYSLYGDTL

SEQ ID NO: 1708 - protein, 9 aa, Human papillomavirus
NYSLYGDTF

SEQ ID NO: 1709 - protein, 10 aa, Human papillomavirus
LYGDTLEQTL

SEQ ID NO: 1710 - protein, 10 aa, Human papillomavirus
LYGDTLEQTF

SEQ ID NO: 1711 - protein, 9 aa, Human papillomavirus
NEILIRCII

SEQ ID NO: 1712 - protein, 9 aa, Human papillomavirus
LIRCIICQR

SEQ ID NO: 1713 - protein, 9 aa, Human papillomavirus
RFHNISGRF

SEQ ID NO: 1714 - protein, 10 aa, Human papillomavirus
RWTGRCAVCW

SEQ ID NO: 1715 - protein, 9 aa, Human papillomavirus
DFYSRIREL

SEQ ID NO: 1716 - protein, 9 aa, Human papillomavirus
LYNLLIRCL

SEQ ID NO: 1717 - protein, 10 aa, Human papillomavirus
HGDTPTLHEY

SEQ ID NO: 1718 - protein, 10 aa, Human papillomavirus
QPETTDLYCY

SEQ ID NO: 1719 - protein, 9 aa, Human papillomavirus
QAEPDRAHY

SEQ ID NO: 1720 - protein, 10 aa, Human papillomavirus
TFCCKCDSTL

SEQ ID NO: 1721 - protein, 10 aa, Human papillomavirus
TFCCKCDSTF

SEQ ID NO: 1722 - protein, 10 aa, Human papillomavirus
TYCCKCDSTL

SEQ ID NO: 1723 - protein, 10 aa, Human papillomavirus
CMCCKCEARI

SEQ ID NO: 1724 - protein, 10 aa, Human papillomavirus
AFQQLFLNTL

SEQ ID NO: 1725 - protein, 8 aa, Human papillomavirus
LFLNTLSF

SEQ ID NO: 1726 - protein, 10 aa, Human papillomavirus
QPEATDLHCY

SEQ ID NO: 1727 - protein, 10 aa, Human papillomavirus
TFCCQCKSTL

SEQ ID NO: 1728 - protein, 9 aa, Human papillomavirus
LYPEPTDLY

SEQ ID NO: 1729 - protein, 9 aa, Human papillomavirus
LYPEPTDLF

SEQ ID NO: 1730 - protein, 10 aa, Human papillomavirus
YPEPTDLYCY

SEQ ID NO: 1731 - protein, 8 aa, Human papillomavirus
LFLSTLSF

SEQ ID NO: 1732 - protein, 10 aa, Human papillomavirus
RGDKATIKDY

SEQ ID NO: 1733 - protein, 10 aa, Human papillomavirus
QPETTDLHCY

SEQ ID NO: 1734 - protein, 10 aa, Human papillomavirus
TYCHSCDSTL

SEQ ID NO: 1735 - protein, 10 aa, Human papillomavirus
TYCHSCDSTF

SEQ ID NO: 1736 - protein, 8 aa, Human papillomavirus
KFVVQLDI

SEQ ID NO: 1737 - protein, 10 aa, Human papillomavirus
HPEPTDLFCY

SEQ ID NO: 1738 - protein, 9 aa, Human papillomavirus
NYYIVTCCY

SEQ ID NO: 1739 - protein, 9 aa, Human papillomavirus
NYYIVTCCF

SEQ ID NO: 1740 - protein, 10 aa, Human papillomavirus
CYTCGTTVRL

SEQ ID NO: 1741 - protein, 10 aa, Human papillomavirus
CYTCGTTVRF

SEQ ID NO: 1742 - protein, 9 aa, Human papillomavirus
DPQERPRKL

SEQ ID NO: 1743 - protein, 10 aa, Human papillomavirus
RPRKLPQLCT

SEQ ID NO: 1744 - protein, 10 aa, Human papillomavirus
LPQLCTELQT

SEQ ID NO: 1745 - protein, 10 aa, Human papillomavirus
NPYAVCDKCL

SEQ ID NO: 1746 - protein, 9 aa, Human papillomavirus
CPEEKQRHL

SEQ ID NO: 1747 - protein, 9 aa, Human papillomavirus
DPTRRPYKL

SEQ ID NO: 1748 - protein, 10 aa, Human papillomavirus
IPHAACHKCI

SEQ ID NO: 1749 - protein, 9 aa, Human papillomavirus
KPLNPAEKL

SEQ ID NO: 1750 - protein, 9 aa, Human papillomavirus
NPAEKLRHL

SEQ ID NO: 1751 - protein, 9 aa, Human papillomavirus
NPAERPRKL

SEQ ID NO: 1752 - protein, 10 aa, Human papillomavirus
TPHGVCTKCL

SEQ ID NO: 1753 - protein, 9 aa, Human papillomavirus
KPLQRSEVY

SEQ ID NO: 1754 - protein, 10 aa, Human papillomavirus
NPFGICKLCL

SEQ ID NO: 1755 - protein, 9 aa, Human papillomavirus
CPQEKKRHV

SEQ ID NO: 1756 - protein, 9 aa, Human papillomavirus
DPKQRPYKL

SEQ ID NO: 1757 - protein, 9 aa, Human papillomavirus
NPAEKRRHL

SEQ ID NO: 1758 - protein, 9 aa, Human papillomavirus
DPATRPRTL

SEQ ID NO: 1759 - protein, 10 aa, Human papillomavirus
NPYGVCIMCL

SEQ ID NO: 1760 - protein, 9 aa, Human papillomavirus
CPEEKERHV

SEQ ID NO: 1761 - protein, 9 aa, Human papillomavirus
NPQERPRSL

SEQ ID NO: 1762 - protein, 10 aa, Human papillomavirus
FPYAVCRVCL

SEQ ID NO: 1763 - protein, 10 aa, Human papillomavirus
SPLTPEEKQL

SEQ ID NO: 1764 - protein, 9 aa, Human papillomavirus
RFHLIAHGW

SEQ ID NO: 1765 - protein, 9 aa, Human papillomavirus
VYDFVFADL

SEQ ID NO: 1766 - protein, 10 aa, Human papillomavirus
NPFAVCKVCL

SEQ ID NO: 1767 - protein, 9 aa, Human papillomavirus
PFAVCKVCL

SEQ ID NO: 1768 - protein, 9 aa, Human papillomavirus
NYSLYGDTL

SEQ ID NO: 1769 - protein, 9 aa, Human papillomavirus
RFHNISGRW

SEQ ID NO: 1770 - protein, 9 aa, Human papillomavirus
RPRRRQTQV

SEQ ID NO: 1771 - protein, 10 aa, Human papillomavirus
RPYKLPDLCT

SEQ ID NO: 1772 - protein, 10 aa, Human papillomavirus
LPDLCTELNT

SEQ ID NO: 1773 - protein, 9 aa, Human papillomavirus
TPTLHEYML

SEQ ID NO: 1774 - protein, 10 aa, Human papillomavirus
QPETTDLYCY

SEQ ID NO: 1775 - protein, 9 aa, Human papillomavirus
EPDRAHYNI

SEQ ID NO: 1776 - protein, 10 aa, Human papillomavirus
EPDRAHYNIV

SEQ ID NO: 1777 - protein, 9 aa, Human papillomavirus
GPKATLQDI

SEQ ID NO: 1778 - protein, 10 aa, Human papillomavirus
GPKATLQDIV

SEQ ID NO: 1779 - protein, 10 aa, Human papillomavirus
EPQNEIPVDL

SEQ ID NO: 1780 - protein, 10 aa, Human papillomavirus
EPQRHTMLCM

SEQ ID NO: 1781 - protein, 9 aa, Human papillomavirus
TPTLQDYVL

SEQ ID NO: 1782 - protein, 10 aa, Human papillomavirus
QPEATDLHCY

SEQ ID NO: 1783 - protein, 10 aa, Human papillomavirus
LPDSSDEEDV

SEQ ID NO: 1784 - protein, 10 aa, Human papillomavirus
SPAGQAEPDT

SEQ ID NO: 1785 - protein, 9 aa, Human papillomavirus
EPDTSNYNI

SEQ ID NO: 1786 - protein, 10 aa, Human papillomavirus
EPDTSNYNIV

SEQ ID NO: 1787 - protein, 9 aa, Human papillomavirus
KPTLKEYVL

SEQ ID NO: 1788 - protein, 10 aa, Human papillomavirus
YPEPTDLYCY

SEQ ID NO: 1789 - protein, 9 aa, Human papillomavirus
RPDGQAQPA

SEQ ID NO: 1790 - protein, 10 aa, Human papillomavirus
RPDGQAQPAT

SEQ ID NO: 1791 - protein, 9 aa, Human papillomavirus
QPATADYYI

SEQ ID NO: 1792 - protein, 10 aa, Human papillomavirus
QPATADYYIV

SEQ ID NO: 1793 - protein, 9 aa, Human papillomavirus
GPRETLQEI

SEQ ID NO: 1794 - protein, 10 aa, Human papillomavirus
GPRETLQEIV

SEQ ID NO: 1795 - protein, 9 aa, Human papillomavirus
EPQNELDPV

SEQ ID NO: 1796 - protein, 10 aa, Human papillomavirus
EPQRHKILCV

SEQ ID NO: 1797 - protein, 10 aa, Human papillomavirus
QPETTDLHCY

SEQ ID NO: 1798 - protein, 9 aa, Human papillomavirus
RPDGQAEQA

SEQ ID NO: 1799 - protein, 10 aa, Human papillomavirus
RPDGQAEQAT

SEQ ID NO: 1800 - protein, 9 aa, Human papillomavirus
VPTLQDVVL

SEQ ID NO: 1801 - protein, 9 aa, Human papillomavirus
VPCCECKFV

SEQ ID NO: 1802 - protein, 10 aa, Human papillomavirus
VPCCECKFVV

SEQ ID NO: 1803 - protein, 9 aa, Human papillomavirus
NPTLREYIL

SEQ ID NO: 1804 - protein, 10 aa, Human papillomavirus
HPEPTDLFCY

SEQ ID NO: 1805 - protein, 9 aa, Human papillomavirus
GPDGQAQPA

SEQ ID NO: 1806 - protein, 10 aa, Human papillomavirus
GPDGQAQPAT

SEQ ID NO: 1807 - protein, 9 aa, Human papillomavirus
QPATANYYI

SEQ ID NO: 1808 - protein, 10 aa, Human papillomavirus
QPATANYYIV

SEQ ID NO: 1809 - protein, 10 aa, Human papillomavirus
QERPRKLPQL

SEQ ID NO: 1810 - protein, 10 aa, Human papillomavirus
TELQTTIHDI

SEQ ID NO: 1811 - protein, 10 aa, Human papillomavirus
LECVYCKQQL

SEQ ID NO: 1812 - protein, 10 aa, Human papillomavirus
SEYRHYCYSL

SEQ ID NO: 1813 - protein, 9 aa, Human papillomavirus
LEQQYNKPL

SEQ ID NO: 1814 - protein, 9 aa, Human papillomavirus
FEDPTRRPY

SEQ ID NO: 1815 - protein, 10 aa, Human papillomavirus
TELNTSLQDI

SEQ ID NO: 1816 - protein, 9 aa, Human papillomavirus
LELTEVFEF

SEQ ID NO: 1817 - protein, 9 aa, Human papillomavirus
FEFAFKDLF

SEQ ID NO: 1818 - protein, 10 aa, Human papillomavirus
FEFAFKDLFV

SEQ ID NO: 1819 - protein, 10 aa, Human papillomavirus
RELRHYSDSV

SEQ ID NO: 1820 - protein, 10 aa, Human papillomavirus
LEKLTNTGLY

SEQ ID NO: 1821 - protein, 9 aa, Human papillomavirus
LEKLTNTGL

SEQ ID NO: 1822 - protein, 9 aa, Human papillomavirus
NEKRRFHNI

SEQ ID NO: 1823 - protein, 10 aa, Human papillomavirus
AERPRKLHEL

SEQ ID NO: 1824 - protein, 9 aa, Human papillomavirus
HELSSALEI

SEQ ID NO: 1825 - protein, 10 aa, Human papillomavirus
LEIPYDELRL

SEQ ID NO: 1826 - protein, 9 aa, Human papillomavirus
DELRLNCVY

SEQ ID NO: 1827 - protein, 10 aa, Human papillomavirus
TETEVLDFAF

SEQ ID NO: 1828 - protein, 10 aa, Human papillomavirus
SEFRWYRYSV

SEQ ID NO: 1829 - protein, 9 aa, Human papillomavirus
LEKLTNKGI

SEQ ID NO: 1830 - protein, 10 aa, Human papillomavirus
LETTIHNIEL

SEQ ID NO: 1831 - protein, 10 aa, Human papillomavirus
SEYRHYNYSV

SEQ ID NO: 1832 - protein, 9 aa, Human papillomavirus
LEQTVKKPL

SEQ ID NO: 1833 - protein, 9 aa, Human papillomavirus
NEILIRCII

SEQ ID NO: 1834 - protein, 9 aa, Human papillomavirus
QEKKRHVDL

SEQ ID NO: 1835 - protein, 10 aa, Human papillomavirus
TELNTSLQDV

SEQ ID NO: 1836 - protein, 9 aa, Human papillomavirus
LERTEVYQF

SEQ ID NO: 1837 - protein, 10 aa, Human papillomavirus
RELRYYSNSV

SEQ ID NO: 1838 - protein, 10 aa, Human papillomavirus
LEKITNTELY

SEQ ID NO: 1839 - protein, 9 aa, Human papillomavirus
LEKITNTEL

SEQ ID NO: 1840 - protein, 9 aa, Human papillomavirus
DPATRPRTL

SEQ ID NO: 1841 - protein, 10 aa, Human papillomavirus
LEESVHEIRL

SEQ ID NO: 1842 - protein, 9 aa, Human papillomavirus
EESVHEIRL

SEQ ID NO: 1843 - protein, 9 aa, Human papillomavirus
KELQRREVY

SEQ ID NO: 1844 - protein, 10 aa, Human papillomavirus
SEYRHYQYSL

SEQ ID NO: 1845 - protein, 9 aa, Human papillomavirus
LEERVKKPL

SEQ ID NO: 1846 - protein, 9 aa, Human papillomavirus
SEITIRCII

SEQ ID NO: 1847 - protein, 9 aa, Human papillomavirus
CPEEKERHV

SEQ ID NO: 1848 - protein, 9 aa, Human papillomavirus
SECWRPRPV

SEQ ID NO: 1849 - protein, 10 aa, Human papillomavirus
QERPRSLHHL

SEQ ID NO: 1850 - protein, 9 aa, Human papillomavirus
SEVLEIPLI

SEQ ID NO: 1851 - protein, 10 aa, Human papillomavirus
LEIPLIDLRL

SEQ ID NO: 1852 - protein, 9 aa, Human papillomavirus
KELTRAEVY

SEQ ID NO: 1853 - protein, 9 aa, Human papillomavirus
LESITKKQL

SEQ ID NO: 1854 - protein, 10 aa, Human papillomavirus
EEKPRTLHDL

SEQ ID NO: 1855 - protein, 10 aa, Human papillomavirus
LETSVHEIEL

SEQ ID NO: 1856 - protein, 10 aa, Human papillomavirus
SEYRHYNYSL

SEQ ID NO: 1857 - protein, 9 aa, Human papillomavirus
LEQTLKKCL

SEQ ID NO: 1858 - protein, 9 aa, Human papillomavirus
CPQEKKRHV

SEQ ID NO: 1859 - protein, 9 aa, Human papillomavirus
PETTDLYCY

SEQ ID NO: 1860 - protein, 10 aa, Human papillomavirus
AEPDRAHYNI

SEQ ID NO: 1861 - protein, 9 aa, Human papillomavirus
LEDLLMGTL

SEQ ID NO: 1862 - protein, 9 aa, Human papillomavirus
LEPQNEIPV

SEQ ID NO: 1863 - protein, 10 aa, Human papillomavirus
EEENDEIDGV

SEQ ID NO: 1864 - protein, 9 aa, Human papillomavirus
EENDEIDGV

SEQ ID NO: 1865 - protein, 9 aa, Human papillomavirus
AEPQRHTML

SEQ ID NO: 1866 - protein, 9 aa, Human papillomavirus
CEARIELVV

SEQ ID NO: 1867 - protein, 9 aa, Human papillomavirus
GETPTLQDY

SEQ ID NO: 1868 - protein, 10 aa, Human papillomavirus
GETPTLQDYV

SEQ ID NO: 1869 - protein, 9 aa, Human papillomavirus
PEATDLHCY

SEQ ID NO: 1870 - protein, 10 aa, Human papillomavirus
AEPDTSNYNI

SEQ ID NO: 1871 - protein, 10 aa, Human papillomavirus
QELLMGSFGI

SEQ ID NO: 1872 - protein, 9 aa, Human papillomavirus
PEPTDLYCY

SEQ ID NO: 1873 - protein, 9 aa, Human papillomavirus
RPDGQAQPA

SEQ ID NO: 1874 - protein, 9 aa, Human papillomavirus
RETLQEIVL

SEQ ID NO: 1875 - protein, 10 aa, Human papillomavirus
LEPQNELDPV

SEQ ID NO: 1876 - protein, 9 aa, Human papillomavirus
NELDPVDLL

SEQ ID NO: 1877 - protein, 10 aa, Human papillomavirus
EEENDEADGV

SEQ ID NO: 1878 - protein, 9 aa, Human papillomavirus
EENDEADGV

SEQ ID NO: 1879 - protein, 9 aa, Human papillomavirus
AEPQRHKIL

SEQ ID NO: 1880 - protein, 10 aa, Human papillomavirus
AEDLRTLQQL

SEQ ID NO: 1881 - protein, 9 aa, Human papillomavirus
PETTDLHCY

SEQ ID NO: 1882 - protein, 9 aa, Human papillomavirus
RPDGQAEQA

SEQ ID NO: 1883 - protein, 9 aa, Human papillomavirus
AEQATSNYY

SEQ ID NO: 1884 - protein, 10 aa, Human papillomavirus
AEQATSNYYI

SEQ ID NO: 1885 - protein, 9 aa, Human papillomavirus
LELTPQTEI

SEQ ID NO: 1886 - protein, 9 aa, Human papillomavirus
SEDEDEDEV

SEQ ID NO: 1887 - protein, 10 aa, Human papillomavirus
DEDEDEVDHL

SEQ ID NO: 1888 - protein, 9 aa, Human papillomavirus
VPCCECKFV

SEQ ID NO: 1889 - protein, 9 aa, Human papillomavirus
CECKFVVQL

SEQ ID NO: 1890 - protein, 10 aa, Human papillomavirus
KEDLRVVQQL

SEQ ID NO: 1891 - protein, 9 aa, Human papillomavirus
PEPTDLFCY

SEQ ID NO: 1892 - protein, 15 aa, Human papillomavirus
HALFTAQEAKQHRDA

SEQ ID NO: 1893 - protein, 15 aa, Human papillomavirus
NTEVETQQMLQVEGR

SEQ ID NO: 1894 - protein, 15 aa, Human papillomavirus
LNVLKTSNAKAAMLA

SEQ ID NO: 1895 - protein, 15 aa, Human papillomavirus
ACSWGMVVLLLVRYK

SEQ ID NO: 1896 - protein, 15 aa, Human papillomavirus
SWGMVVLLLVRYKCG

SEQ ID NO: 1897 - protein, 15 aa, Human papillomavirus
RETIEKLLSKLLCVS

SEQ ID NO: 1898 - protein, 15 aa, Human papillomavirus
EKLLSKLLCVSPMCM

SEQ ID NO: 1899 - protein, 15 aa, Human papillomavirus
PMCMMIEPPKLRSTA

SEQ ID NO: 1900 - protein, 15 aa, Human papillomavirus
LYWYKTGISNISEVY

SEQ ID NO: 1901 - protein, 15 aa, Human papillomavirus
TPEWIQRQTVLQHSF

SEQ ID NO: 1902 - protein, 15 aa, Human papillomavirus
PEWIQRQTVLQHSFN

SEQ ID NO: 1903 - protein, 15 aa, Human papillomavirus
DSEIAYKYAQLADTN

SEQ ID NO: 1904 - protein, 15 aa, Human papillomavirus
GGDWKQIVMFLRYQG

SEQ ID NO: 1905 - protein, 15 aa, Human papillomavirus
VMFLRYQGVEFMSFL

SEQ ID NO: 1906 - protein, 15 aa, Human papillomavirus
VEFMSFLTALKRFLQ

SEQ ID NO: 1907 - protein, 15 aa, Human papillomavirus
LKRFLQGIPKKNCIL

SEQ ID NO: 1908 - protein, 15 aa, Human papillomavirus
NCILLYGAANTGKSL

SEQ ID NO: 1909 - protein, 15 aa, Human papillomavirus
ILLYGAANTGKSLFG

SEQ ID NO: 1910 - protein, 15 aa, Human papillomavirus
GKSLFGMSLMKFLQG

SEQ ID NO: 1911 - protein, 15 aa, Human papillomavirus
KSLFGMSLMKFLQGS

SEQ ID NO: 1912 - protein, 15 aa, Human papillomavirus
LVQLKCPPLLITSNI

SEQ ID NO: 1913 - protein, 15 aa, Human papillomavirus
QAELETAQALFHAQE

SEQ ID NO: 1914 - protein, 15 aa, Human papillomavirus
VTAIFGVNPTIAEGF

SEQ ID NO: 1915 - protein, 15 aa, Human papillomavirus
TAIFGVNPTIAEGFK

SEQ ID NO: 1916 - protein, 15 aa, Human papillomavirus
FKTLIQPFILYAHIQ

SEQ ID NO: 1917 - protein, 15 aa, Human papillomavirus
DCKWGVLILALLRYK

SEQ ID NO: 1918 - protein, 15 aa, Human papillomavirus
KWGVLILALLRYKCG

SEQ ID NO: 1919 - protein, 15 aa, Human papillomavirus
RLTVAKGLSTLLHVP

SEQ ID NO: 1920 - protein, 15 aa, Human papillomavirus
ETCMLIQPPKLRSSV

SEQ ID NO: 1921 - protein, 15 aa, Human papillomavirus
TPEWIQRLTIIQHGI

SEQ ID NO: 1922 - protein, 15 aa, Human papillomavirus
PEWIQRLTIIQHGID

SEQ ID NO: 1923 - protein, 15 aa, Human papillomavirus
ESDMAFEYALLADSN

SEQ ID NO: 1924 - protein, 15 aa, Human papillomavirus
IEFITFLGALKSFLK

SEQ ID NO: 1925 - protein, 15 aa, Human papillomavirus
ITFLGALKSFLKGTP

SEQ ID NO: 1926 - protein, 15 aa, Human papillomavirus
LKSFLKGTPKKNCLV

SEQ ID NO: 1927 - protein, 15 aa, Human papillomavirus
FIHFIQGAVISFVNS

SEQ ID NO: 1928 - protein, 15 aa, Human papillomavirus
IHFIQGAVISFVNST

SEQ ID NO: 1929 - protein, 15 aa, Human papillomavirus
LIQLKCPPILLTTNI

SEQ ID NO: 1930 - protein, 15 aa, Human papillomavirus
NTEVETQQMVQVEEQ

SEQ ID NO: 1931 - protein, 15 aa, Human papillomavirus
MVQVEEQQTTLSCNG

SEQ ID NO: 1932 - protein, 15 aa, Human papillomavirus
LYGVSFMELIRPFQS

SEQ ID NO: 1933 - protein, 15 aa, Human papillomavirus
DWCVAAFGVTGTVAE

SEQ ID NO: 1934 - protein, 15 aa, Human papillomavirus
ACSWGMVMLMLVRFK

SEQ ID NO: 1935 - protein, 15 aa, Human papillomavirus
SWGMVMLMLVRFKCA

SEQ ID NO: 1936 - protein, 15 aa, Human papillomavirus
EKLLEKLLCISTNCM

SEQ ID NO: 1937 - protein, 15 aa, Human papillomavirus
TNCMLIQPPKLRSTA

SEQ ID NO: 1938 - protein, 15 aa, Human papillomavirus
CMLIQPPKLRSTAAA

SEQ ID NO: 1939 - protein, 15 aa, Human papillomavirus
TPEWIERQTVLQHSF

SEQ ID NO: 1940 - protein, 15 aa, Human papillomavirus
PEWIERQTVLQHSFN

SEQ ID NO: 1941 - protein, 15 aa, Human papillomavirus
DTTFDLSQMVQWAYD

SEQ ID NO: 1942 - protein, 15 aa, Human papillomavirus
DSEIAYKYAQLADSD

SEQ ID NO: 1943 - protein, 15 aa, Human papillomavirus
VKFLRYQQIEFVSFL

SEQ ID NO: 1944 - protein, 15 aa, Human papillomavirus
VSFLSALKLFLKGVP

SEQ ID NO: 1945 - protein, 15 aa, Human papillomavirus
LKLFLKGVPKKNCIL

SEQ ID NO: 1946 - protein, 15 aa, Human papillomavirus
KNCILIHGAPNTGKS

SEQ ID NO: 1947 - protein, 15 aa, Human papillomavirus
GKSYFGMSLISFLQG

SEQ ID NO: 1948 - protein, 15 aa, Human papillomavirus
LMQLKCPPLLITSNI

SEQ ID NO: 1949 - protein, 15 aa, Human papillomavirus
DDRWPYLHSRLVVFT

SEQ ID NO: 1950 - protein, 15 aa, Human papillomavirus
NTEVETQQMVQQVES

SEQ ID NO: 1951 - protein, 15 aa, Human papillomavirus
AYGISFMELVRPFKS

SEQ ID NO: 1952 - protein, 15 aa, Human papillomavirus
LKVLIKQHSLYTHLQ

SEQ ID NO: 1953 - protein, 15 aa, Human papillomavirus
DRGIIILLLIRFRCS

SEQ ID NO: 1954 - protein, 15 aa, Human papillomavirus
RGIIILLLIRFRCSK

SEQ ID NO: 1955 - protein, 15 aa, Human papillomavirus
KNRLTVAKLMSNLLS

SEQ ID NO: 1956 - protein, 15 aa, Human papillomavirus
RLTVAKLMSNLLSIP

SEQ ID NO: 1957 - protein, 15 aa, Human papillomavirus
AKLMSNLLSIPETCM

SEQ ID NO: 1958 - protein, 15 aa, Human papillomavirus
SNLLSIPETCMVIEP

SEQ ID NO: 1959 - protein, 15 aa, Human papillomavirus
ETCMVIEPPKLRSQT

SEQ ID NO: 1960 - protein, 15 aa, Human papillomavirus
TPEWIDRLTVLQHSF

SEQ ID NO: 1961 - protein, 15 aa, Human papillomavirus
PEWIDRLTVLQHSFN

SEQ ID NO: 1962 - protein, 15 aa, Human papillomavirus
DSDIAYYYAQLADSN

SEQ ID NO: 1963 - protein, 15 aa, Human papillomavirus
IAYYYAQLADSNSNA

SEQ ID NO: 1964 - protein, 15 aa, Human papillomavirus
FKKFLKGIPKKSCML

SEQ ID NO: 1965 - protein, 15 aa, Human papillomavirus
SCMLICGPANTGKSY

SEQ ID NO: 1966 - protein, 15 aa, Human papillomavirus
GKSYFGMSLIQFLKG

SEQ ID NO: 1967 - protein, 15 aa, Human papillomavirus
IQFLKGCVISCVNSK

SEQ ID NO: 1968 - protein, 15 aa, Human papillomavirus
LVQLKCPPLLLTSNT

SEQ ID NO: 1969 - protein, 15 aa, Human papillomavirus
VDFIDTQLSICEQAE

SEQ ID NO: 1970 - protein, 15 aa, Human papillomavirus
DWVMAIFGVNPTVAE

SEQ ID NO: 1971 - protein, 15 aa, Human papillomavirus
VMAIFGVNPTVAEGF

SEQ ID NO: 1972 - protein, 15 aa, Human papillomavirus
MAIFGVNPTVAEGFK

SEQ ID NO: 1973 - protein, 15 aa, Human papillomavirus
FKTLIKPATLYAHIQ

SEQ ID NO: 1974 - protein, 15 aa, Human papillomavirus
KTLIKPATLYAHIQC

SEQ ID NO: 1975 - protein, 15 aa, Human papillomavirus
ETCMLIEPPKLRSSV

SEQ ID NO: 1976 - protein, 15 aa, Human papillomavirus
ESDMAFQYAQLADCN

SEQ ID NO: 1977 - protein, 15 aa, Human papillomavirus
LKEFLKGTPKKNCIL

SEQ ID NO: 1978 - protein, 15 aa, Human papillomavirus
NCILLYGPANTGKSY

SEQ ID NO: 1979 - protein, 15 aa, Human papillomavirus
FIHFLQGAIISFVNS

SEQ ID NO: 1980 - protein, 15 aa, Human papillomavirus
IHFLQGAIISFVNSN

SEQ ID NO: 1981 - protein, 15 aa, Human papillomavirus
CWTYFDNYMRNALDG

SEQ ID NO: 1982 - protein, 15 aa, Human papillomavirus
LLQLKCPPILLTSNI

SEQ ID NO: 1983 - protein, 15 aa, Human papillomavirus
VTVFTFPHAFPFDKN

SEQ ID NO: 1984 - protein, 15 aa, Human papillomavirus
EDDLHAVSAVKRKFT

SEQ ID NO: 1985 - protein, 15 aa, Human papillomavirus
TVLFKFKETYGVSFM

SEQ ID NO: 1986 - protein, 15 aa, Human papillomavirus
TYGVSFMELVRPFKS

SEQ ID NO: 1987 - protein, 15 aa, Human papillomavirus
DWCIIGMGVTPSVAE

SEQ ID NO: 1988 - protein, 15 aa, Human papillomavirus
WCIIGMGVTPSVAEG

SEQ ID NO: 1989 - protein, 15 aa, Human papillomavirus
LKVLIQPYSIYAHLQ

SEQ ID NO: 1990 - protein, 15 aa, Human papillomavirus
DRGVLILLLIRFKCG

SEQ ID NO: 1991 - protein, 15 aa, Human papillomavirus
RLTVSKLMSQLLNIP

SEQ ID NO: 1992 - protein, 15 aa, Human papillomavirus
VSKLMSQLLNIPETH

SEQ ID NO: 1993 - protein, 15 aa, Human papillomavirus
SQLLNIPETHMVIEP

SEQ ID NO: 1994 - protein, 15 aa, Human papillomavirus
ETHMVIEPPKLRSAT

SEQ ID NO: 1995 - protein, 15 aa, Human papillomavirus
TPEWIEQQTVLQHSF

SEQ ID NO: 1996 - protein, 15 aa, Human papillomavirus
PEWIEQQTVLQHSFD

SEQ ID NO: 1997 - protein, 15 aa, Human papillomavirus
NSIFDFGEMVQWAYD

SEQ ID NO: 1998 - protein, 15 aa, Human papillomavirus
DSDIAYKYAQLADVN

SEQ ID NO: 1999 - protein, 15 aa, Human papillomavirus
DIAYKYAQLADVNSN

SEQ ID NO: 2000 - protein, 15 aa, Human papillomavirus
FKKFLKGIPKKNCLV

SEQ ID NO: 2001 - protein, 15 aa, Human papillomavirus
NCLVLYGPANTGKSY

SEQ ID NO: 2002 - protein, 15 aa, Human papillomavirus
GKSYFGMSLIRFLSG

SEQ ID NO: 2003 - protein, 15 aa, Human papillomavirus
LVQIKCPPLILTTNT

SEQ ID NO: 2004 - protein, 15 aa, Human papillomavirus
DPRWPYLHSRLVVFH

SEQ ID NO: 2005 - protein, 15 aa, Human papillomavirus
GQQLLQVQTAHADKQ

SEQ ID NO: 2006 - protein, 15 aa, Human papillomavirus
QQLLQVQTAHADKQT

SEQ ID NO: 2007 - protein, 15 aa, Human papillomavirus
LLQVQTAHADKQTLQ

SEQ ID NO: 2008 - protein, 15 aa, Human papillomavirus
LRDISNQQTVCREGV

SEQ ID NO: 2009 - protein, 15 aa, Human papillomavirus
KEVYGIPFSELVRTF

SEQ ID NO: 2010 - protein, 15 aa, Human papillomavirus
LKTIIKPHCMYYHMQ

SEQ ID NO: 2011 - protein, 15 aa, Human papillomavirus
TCTWGVIVMMLIRYT

SEQ ID NO: 2012 - protein, 15 aa, Human papillomavirus
TWGVIVMMLIRYTCG

SEQ ID NO: 2013 - protein, 15 aa, Human papillomavirus
WGVIVMMLIRYTCGK

SEQ ID NO: 2014 - protein, 15 aa, Human papillomavirus
RKTIAKALSSILNVP

SEQ ID NO: 2015 - protein, 15 aa, Human papillomavirus
QEQMLIQPPKIRSPA

SEQ ID NO: 2016 - protein, 15 aa, Human papillomavirus
QMLIQPPKIRSPAVA

SEQ ID NO: 2017 - protein, 15 aa, Human papillomavirus
PPKIRSPAVALYFYK

SEQ ID NO: 2018 - protein, 15 aa, Human papillomavirus
VALYFYKTAMSNISD

SEQ ID NO: 2019 - protein, 15 aa, Human papillomavirus
LYFYKTAMSNISDVY

SEQ ID NO: 2020 - protein, 15 aa, Human papillomavirus
TPEWIQRQTQLQHSL

SEQ ID NO: 2021 - protein, 15 aa, Human papillomavirus
DSQIAFQYAQLADVD

SEQ ID NO: 2022 - protein, 15 aa, Human papillomavirus
QIAFQYAQLADVDSN

SEQ ID NO: 2023 - protein, 15 aa, Human papillomavirus
FLSYFKLFLQGTPKH

SEQ ID NO: 2024 - protein, 15 aa, Human papillomavirus
YFKLFLQGTPKHNCL

SEQ ID NO: 2025 - protein, 15 aa, Human papillomavirus
FKLFLQGTPKHNCLV

SEQ ID NO: 2026 - protein, 15 aa, Human papillomavirus
LIKFFQGSVISFVNS

SEQ ID NO: 2027 - protein, 15 aa, Human papillomavirus
IKFFQGSVISFVNSQ

SEQ ID NO: 2028 - protein, 15 aa, Human papillomavirus
RNLVDGNPISLDRKH

SEQ ID NO: 2029 - protein, 15 aa, Human papillomavirus
LVQIKCPPLLITTNI

SEQ ID NO: 2030 - protein, 15 aa, Human papillomavirus
PPLLITTNINPMLDA

SEQ ID NO: 2031 - protein, 15 aa, Human papillomavirus
TLLYKFKEAYGVSFM

SEQ ID NO: 2032 - protein, 15 aa, Human papillomavirus
AYGVSFMELVRPFKS

SEQ ID NO: 2033 - protein, 15 aa, Human papillomavirus
LKVLIKQHSIYTHLQ

SEQ ID NO: 2034 - protein, 15 aa, Human papillomavirus
DRGIILLLLIRFKCS

SEQ ID NO: 2035 - protein, 15 aa, Human papillomavirus
ETCMIIEPPKLRSQA

SEQ ID NO: 2036 - protein, 15 aa, Human papillomavirus
FKQFLQGVPKKSCML

SEQ ID NO: 2037 - protein, 15 aa, Human papillomavirus
GKSYFGMSLIHFLKG

SEQ ID NO: 2038 - protein, 15 aa, Human papillomavirus
IHFLKGCIISYVNSK

SEQ ID NO: 2039 - protein, 15 aa, Human papillomavirus
LVQLKCPPLIITSNT

SEQ ID NO: 2040 - protein, 15 aa, Human papillomavirus
HQVVPTLAVSKNKAL

SEQ ID NO: 2041 - protein, 15 aa, Human papillomavirus
TLAVSKNKALQAIEL

SEQ ID NO: 2042 - protein, 15 aa, Human papillomavirus
NKALQAIELQLTLET

SEQ ID NO: 2043 - protein, 15 aa, Human papillomavirus
LQAIELQLTLETIYN

SEQ ID NO: 2044 - protein, 15 aa, Human papillomavirus
SPEIIRQHLANHPAA

SEQ ID NO: 2045 - protein, 15 aa, Human papillomavirus
PEIIRQHLANHPAAT

SEQ ID NO: 2046 - protein, 15 aa, Human papillomavirus
RQHLANHPAATHTKA

SEQ ID NO: 2047 - protein, 15 aa, Human papillomavirus
RDSVDSAPILTAFNS

SEQ ID NO: 2048 - protein, 15 aa, Human papillomavirus
HCTLYTAVSSTWHWT

SEQ ID NO: 2049 - protein, 15 aa, Human papillomavirus
LSQVKIPKTITVSTG

SEQ ID NO: 2050 - protein, 15 aa, Human papillomavirus
AYNISKSKAHKAIEL

SEQ ID NO: 2051 - protein, 15 aa, Human papillomavirus
HKAIELQMALQGLAQ

SEQ ID NO: 2052 - protein, 15 aa, Human papillomavirus
ELQMALQGLAQSRYK

SEQ ID NO: 2053 - protein, 15 aa, Human papillomavirus
DDTVSATQLVKQLQH

SEQ ID NO: 2054 - protein, 15 aa, Human papillomavirus
TVSVGTAKTYGQTSA

SEQ ID NO: 2055 - protein, 15 aa, Human papillomavirus
VNPLLGAATPTGNNK

SEQ ID NO: 2056 - protein, 15 aa, Human papillomavirus
NPLLGAATPTGNNKR

SEQ ID NO: 2057 - protein, 15 aa, Human papillomavirus
RTKFLNTVAIPDSVQ

SEQ ID NO: 2058 - protein, 15 aa, Human papillomavirus
LNTVAIPDSVQILVG

SEQ ID NO: 2059 - protein, 15 aa, Human papillomavirus
NHQVVPALSVSKAKA

SEQ ID NO: 2060 - protein, 15 aa, Human papillomavirus
HQVVPALSVSKAKAL

SEQ ID NO: 2061 - protein, 15 aa, Human papillomavirus
ALSVSKAKALQAIEL

SEQ ID NO: 2062 - protein, 15 aa, Human papillomavirus
AKALQAIELQMMLET

SEQ ID NO: 2063 - protein, 15 aa, Human papillomavirus
LQAIELQMMLETLNN

SEQ ID NO: 2064 - protein, 15 aa, Human papillomavirus
GQVIVFPESVFSSDE

SEQ ID NO: 2065 - protein, 15 aa, Human papillomavirus
EISFAGIVTKLPTAN

SEQ ID NO: 2066 - protein, 15 aa, Human papillomavirus
FAGIVTKLPTANNTT

SEQ ID NO: 2067 - protein, 15 aa, Human papillomavirus
AGIVTKLPTANNTTT

SEQ ID NO: 2068 - protein, 15 aa, Human papillomavirus
NCGVISAAACTNQTR

SEQ ID NO: 2069 - protein, 15 aa, Human papillomavirus
LNTVKIPNTVSVSTG

SEQ ID NO: 2070 - protein, 15 aa, Human papillomavirus
LIRMECALLYTAKQM

SEQ ID NO: 2071 - protein, 15 aa, Human papillomavirus
HQVVPSLLASKTKAF

SEQ ID NO: 2072 - protein, 15 aa, Human papillomavirus
AFQVIELQMALETLS

SEQ ID NO: 2073 - protein, 15 aa, Human papillomavirus
FQVIELQMALETLSK

SEQ ID NO: 2074 - protein, 15 aa, Human papillomavirus
ELQMALETLSKSQYS

SEQ ID NO: 2075 - protein, 15 aa, Human papillomavirus
EVHVGGQVIVCPTSI

SEQ ID NO: 2076 - protein, 15 aa, Human papillomavirus
GQVIVCPTSISSNQI

SEQ ID NO: 2077 - protein, 15 aa, Human papillomavirus
DPALDNRTARTATNC

SEQ ID NO: 2078 - protein, 15 aa, Human papillomavirus
QQQMFLGTVKIPPTV

SEQ ID NO: 2079 - protein, 15 aa, Human papillomavirus
QMFLGTVKIPPTVQI

SEQ ID NO: 2080 - protein, 15 aa, Human papillomavirus
LGTVKIPPTVQISTG

SEQ ID NO: 2081 - protein, 15 aa, Human papillomavirus
LIRLENAILFTAREH

SEQ ID NO: 2082 - protein, 15 aa, Human papillomavirus
PINISKSKAHKAIEL

SEQ ID NO: 2083 - protein, 15 aa, Human papillomavirus
HKAIELQMALKGLAQ

SEQ ID NO: 2084 - protein, 15 aa, Human papillomavirus
ELQMALKGLAQSKYN

SEQ ID NO: 2085 - protein, 15 aa, Human papillomavirus
TASVGTPKPHIQTPA

SEQ ID NO: 2086 - protein, 15 aa, Human papillomavirus
KPHIQTPATKRPRQC

SEQ ID NO: 2087 - protein, 15 aa, Human papillomavirus
RNTFLDVVTIPNSVQ

SEQ ID NO: 2088 - protein, 15 aa, Human papillomavirus
LDVVTIPNSVQISVG

SEQ ID NO: 2089 - protein, 15 aa, Human papillomavirus
ITHIGHQVVPPMAVS

SEQ ID NO: 2090 - protein, 15 aa, Human papillomavirus
GHQVVPPMAVSKAKA

SEQ ID NO: 2091 - protein, 15 aa, Human papillomavirus
HQVVPPMAVSKAKAC

SEQ ID NO: 2092 - protein, 15 aa, Human papillomavirus
PMAVSKAKACQAIEL

SEQ ID NO: 2093 - protein, 15 aa, Human papillomavirus
CQAIELQLALEALNK

SEQ ID NO: 2094 - protein, 15 aa, Human papillomavirus
EVHVGGQVIVCPASV

SEQ ID NO: 2095 - protein, 15 aa, Human papillomavirus
GQVIVCPASVSSNEV

SEQ ID NO: 2096 - protein, 15 aa, Human papillomavirus
LKTVKIPNTVQVIQG

SEQ ID NO: 2097 - protein, 15 aa, Human papillomavirus
CSAIEVQIALESLST

SEQ ID NO: 2098 - protein, 15 aa, Human papillomavirus
RYRFQKYKTLFVDVT

SEQ ID NO: 2099 - protein, 15 aa, Human papillomavirus
LSHVKIPVVYRLVWD

SEQ ID NO: 2100 - protein, 15 aa, Human papillomavirus
HWKLIRMECAIMYTA

SEQ ID NO: 2101 - protein, 15 aa, Human papillomavirus
LIRMECAIMYTARQM

SEQ ID NO: 2102 - protein, 15 aa, Human papillomavirus
HQVVPSLVASKTKAF

SEQ ID NO: 2103 - protein, 15 aa, Human papillomavirus
AFQVIELQMALETLN

SEQ ID NO: 2104 - protein, 15 aa, Human papillomavirus
FQVIELQMALETLNA

SEQ ID NO: 2105 - protein, 15 aa, Human papillomavirus
QKCFKKKGITVTVQY

SEQ ID NO: 2106 - protein, 15 aa, Human papillomavirus
SRVIVCPTSIPSDQI

SEQ ID NO: 2107 - protein, 15 aa, Human papillomavirus
LNTVKIPPTVQISTG

SEQ ID NO: 2108 - protein, 15 aa, Human papillomavirus
NGWFYVEAVVEKKTG

SEQ ID NO: 2109 - protein, 15 aa, Human papillomavirus
GDAISDDENENDSDT

SEQ ID NO: 2110 - protein, 15 aa, Human papillomavirus
VDFIVNDNDYLTQAE

SEQ ID NO: 2111 - protein, 15 aa, Human papillomavirus
LKAICIEKQSRAAKR

SEQ ID NO: 2112 - protein, 15 aa, Human papillomavirus
RRLFESEDSGYGNTE

SEQ ID NO: 2113 - protein, 15 aa, Human papillomavirus
PMCMMIEPPKLRSTA

SEQ ID NO: 2114 - protein, 15 aa, Human papillomavirus
ISEVYGDTPEWIQRQ

SEQ ID NO: 2115 - protein, 15 aa, Human papillomavirus
QWAYDNDIVDDSEIA

SEQ ID NO: 2116 - protein, 15 aa, Human papillomavirus
DNDIVDDSEIAYKYA

SEQ ID NO: 2117 - protein, 15 aa, Human papillomavirus
QAKIVKDCATMCRHY

SEQ ID NO: 2118 - protein, 15 aa, Human papillomavirus
WIKYRCDRVDDGGDW

SEQ ID NO: 2119 - protein, 15 aa, Human papillomavirus
KIGMLDDATVPCWNY

SEQ ID NO: 2120 - protein, 15 aa, Human papillomavirus
CWNYIDDNLRNALDG

SEQ ID NO: 2121 - protein, 15 aa, Human papillomavirus
VFTFPNEFPFDENGN

SEQ ID NO: 2122 - protein, 15 aa, Human papillomavirus
PNEFPFDENGNPVYE

SEQ ID NO: 2123 - protein, 15 aa, Human papillomavirus
RLSLHEDEDKENDGD

SEQ ID NO: 2124 - protein, 15 aa, Human papillomavirus
TGDVISDDEDENATD

SEQ ID NO: 2125 - protein, 15 aa, Human papillomavirus
GDVISDDEDENATDT

SEQ ID NO: 2126 - protein, 15 aa, Human papillomavirus
AQEVHNDAQVLHVLK

SEQ ID NO: 2127 - protein, 15 aa, Human papillomavirus
GERLEVDTELSPRLQ

SEQ ID NO: 2128 - protein, 15 aa, Human papillomavirus
RLEVDTELSPRLQEI

SEQ ID NO: 2129 - protein, 15 aa, Human papillomavirus
MLAVFKDTYGLSFTD

SEQ ID NO: 2130 - protein, 15 aa, Human papillomavirus
VRNFKSDKTTCTDWV

SEQ ID NO: 2131 - protein, 15 aa, Human papillomavirus
ISEVMGDTPEWIQRL

SEQ ID NO: 2132 - protein, 15 aa, Human papillomavirus
QWAFDNELTDESDMA

SEQ ID NO: 2133 - protein, 15 aa, Human papillomavirus
DNELTDESDMAFEYA

SEQ ID NO: 2134 - protein, 15 aa, Human papillomavirus
ESDMAFEYALLADSN

SEQ ID NO: 2135 - protein, 15 aa, Human papillomavirus
EYALLADSNSNAAAF

SEQ ID NO: 2136 - protein, 15 aa, Human papillomavirus
QAKYLKDCATMCKHY

SEQ ID NO: 2137 - protein, 15 aa, Human papillomavirus
TSHFWLEPLTDTKVA

SEQ ID NO: 2138 - protein, 15 aa, Human papillomavirus
KVAMLDDATTTCWTY

SEQ ID NO: 2139 - protein, 15 aa, Human papillomavirus
PNAFPFDKNGNPVYE

SEQ ID NO: 2140 - protein, 15 aa, Human papillomavirus
RLDLHEEEEDADTEG

SEQ ID NO: 2141 - protein, 15 aa, Human papillomavirus
NGWFYVEAVIDRQTG

SEQ ID NO: 2142 - protein, 15 aa, Human papillomavirus
GDNISEDENEDSSDT

SEQ ID NO: 2143 - protein, 15 aa, Human papillomavirus
LKAICIENNSKTAKR

SEQ ID NO: 2144 - protein, 15 aa, Human papillomavirus
QQMVQVEEQQTTLSC

SEQ ID NO: 2145 - protein, 15 aa, Human papillomavirus
KNRITIEKLLEKLLC

SEQ ID NO: 2146 - protein, 15 aa, Human papillomavirus
ISDVYGETPEWIERQ

SEQ ID NO: 2147 - protein, 15 aa, Human papillomavirus
QWAYDNDVMDDSEIA

SEQ ID NO: 2148 - protein, 15 aa, Human papillomavirus
DNDVMDDSEIAYKYA

SEQ ID NO: 2149 - protein, 15 aa, Human papillomavirus
QAKIVKDCGTMCRHY

SEQ ID NO: 2150 - protein, 15 aa, Human papillomavirus
CDKVSDEGDWRDIVK

SEQ ID NO: 2151 - protein, 15 aa, Human papillomavirus
KIGMLDDATTPCWHY

SEQ ID NO: 2152 - protein, 15 aa, Human papillomavirus
PNPFPFDKNGNPVYE

SEQ ID NO: 2153 - protein, 15 aa, Human papillomavirus
RLNLHEEEDKENDGD

SEQ ID NO: 2154 - protein, 15 aa, Human papillomavirus
TGWFEVEAVIERRTG

SEQ ID NO: 2155 - protein, 15 aa, Human papillomavirus
GDNISEDEDETADDS

SEQ ID NO: 2156 - protein, 15 aa, Human papillomavirus
LLEFIDDSMENSIQA

SEQ ID NO: 2157 - protein, 15 aa, Human papillomavirus
ENSIQADTEAARALF

SEQ ID NO: 2158 - protein, 15 aa, Human papillomavirus
SSGVGDDSEVSCETN

SEQ ID NO: 2159 - protein, 15 aa, Human papillomavirus
DSEVSCETNVDSCEN

SEQ ID NO: 2160 - protein, 15 aa, Human papillomavirus
VRPFKSDKTSCTDWC

SEQ ID NO: 2161 - protein, 15 aa, Human papillomavirus
LQCLTCDRGIIILLL

SEQ ID NO: 2162 - protein, 15 aa, Human papillomavirus
ETCMVIEPPKLRSQT

SEQ ID NO: 2163 - protein, 15 aa, Human papillomavirus
QWAYDNELTDDSDIA

SEQ ID NO: 2164 - protein, 15 aa, Human papillomavirus
DNELTDDSDIAYYYA

SEQ ID NO: 2165 - protein, 15 aa, Human papillomavirus
QAKIVKDCGIMCRHY

SEQ ID NO: 2166 - protein, 15 aa, Human papillomavirus
KIGMIDDVTPISWTY

SEQ ID NO: 2167 - protein, 15 aa, Human papillomavirus
SWTYIDDYMRNALDG

SEQ ID NO: 2168 - protein, 15 aa, Human papillomavirus
KNPFPFDENGNPVYA

SEQ ID NO: 2169 - protein, 15 aa, Human papillomavirus
VYAINDENWKSFFSR

SEQ ID NO: 2170 - protein, 15 aa, Human papillomavirus
KLDLIEEEDKENHGG

SEQ ID NO: 2171 - protein, 15 aa, Human papillomavirus
NGWFFVETIVEKKTG

SEQ ID NO: 2172 - protein, 15 aa, Human papillomavirus
TGDVISDDEDETATD

SEQ ID NO: 2173 - protein, 15 aa, Human papillomavirus
GDVISDDEDETATDT

SEQ ID NO: 2174 - protein, 15 aa, Human papillomavirus
AQEVQNDAQVLHLLK

SEQ ID NO: 2175 - protein, 15 aa, Human papillomavirus
GEQLSVDTDLSPRLQ

SEQ ID NO: 2176 - protein, 15 aa, Human papillomavirus
QLSVDTDLSPRLQEI

SEQ ID NO: 2177 - protein, 15 aa, Human papillomavirus
MLAVFKDIYGLSFTD

SEQ ID NO: 2178 - protein, 15 aa, Human papillomavirus
ETCMLIEPPKLRSSV

SEQ ID NO: 2179 - protein, 15 aa, Human papillomavirus
ISEVSGDTPEWIQRL

SEQ ID NO: 2180 - protein, 15 aa, Human papillomavirus
QWAFDNDLTDESDMA

SEQ ID NO: 2181 - protein, 15 aa, Human papillomavirus
DNDLTDESDMAFQYA

SEQ ID NO: 2182 - protein, 15 aa, Human papillomavirus
QAKYLKDCAVMCRHY

SEQ ID NO: 2183 - protein, 15 aa, Human papillomavirus
NSHFWLEPLADTKVA

SEQ ID NO: 2184 - protein, 15 aa, Human papillomavirus
KVAMLDDATHTCWTY

SEQ ID NO: 2185 - protein, 15 aa, Human papillomavirus
PHAFPFDKNGNPVYE

SEQ ID NO: 2186 - protein, 15 aa, Human papillomavirus
RLDLHEDDEDADTEG

SEQ ID NO: 2187 - protein, 15 aa, Human papillomavirus
TGWFEVEAIIEKQTG

SEQ ID NO: 2188 - protein, 15 aa, Human papillomavirus
GDNISEDEDENAYDS

SEQ ID NO: 2189 - protein, 15 aa, Human papillomavirus
LIDFIDDSNINNEQA

SEQ ID NO: 2190 - protein, 15 aa, Human papillomavirus
DSNINNEQAEHEAAR

SEQ ID NO: 2191 - protein, 15 aa, Human papillomavirus
HICVNTECVLPKRKP

SEQ ID NO: 2192 - protein, 15 aa, Human papillomavirus
IQNIMCENSIKTTVL

SEQ ID NO: 2193 - protein, 15 aa, Human papillomavirus
LQCLTCDRGVLILLL

SEQ ID NO: 2194 - protein, 15 aa, Human papillomavirus
ETHMVIEPPKLRSAT

SEQ ID NO: 2195 - protein, 15 aa, Human papillomavirus
QWAYDHDITDDSDIA

SEQ ID NO: 2196 - protein, 15 aa, Human papillomavirus
DHDITDDSDIAYKYA

SEQ ID NO: 2197 - protein, 15 aa, Human papillomavirus
WIQYRCDRIDDGGDW

SEQ ID NO: 2198 - protein, 15 aa, Human papillomavirus
KVGMIDDVTPICWTY

SEQ ID NO: 2199 - protein, 15 aa, Human papillomavirus
CWTYIDDYMRNALDG

SEQ ID NO: 2200 - protein, 15 aa, Human papillomavirus
KNPFPFDENGNPIYE

SEQ ID NO: 2201 - protein, 15 aa, Human papillomavirus
IYEINNENWKSFFSR

SEQ ID NO: 2202 - protein, 15 aa, Human papillomavirus
KLDLIQEEDKENDGV

SEQ ID NO: 2203 - protein, 15 aa, Human papillomavirus
CGWFEVEAIVEKKTG

SEQ ID NO: 2204 - protein, 15 aa, Human papillomavirus
GDKISDDESDEEDEI

SEQ ID NO: 2205 - protein, 15 aa, Human papillomavirus
EDEIDTDLDGFIDDS

SEQ ID NO: 2206 - protein, 15 aa, Human papillomavirus
LDGFIDDSYIQNIQA

SEQ ID NO: 2207 - protein, 15 aa, Human papillomavirus
IQNIQADAETGQQLL

SEQ ID NO: 2208 - protein, 15 aa, Human papillomavirus
QQTVCREGVKRRLIL

SEQ ID NO: 2209 - protein, 15 aa, Human papillomavirus
RRLILSDLQDSGYGN

SEQ ID NO: 2210 - protein, 15 aa, Human papillomavirus
PEQVDEEVQGRGCGN

SEQ ID NO: 2211 - protein, 15 aa, Human papillomavirus
DSVIHMDIDRNNETP

SEQ ID NO: 2212 - protein, 15 aa, Human papillomavirus
VIHMDIDRNNETPTQ

SEQ ID NO: 2213 - protein, 15 aa, Human papillomavirus
VRTFKSDSTCCNDWI

SEQ ID NO: 2214 - protein, 15 aa, Human papillomavirus
ILNVPQEQMLIQPPK

SEQ ID NO: 2215 - protein, 15 aa, Human papillomavirus
ISDVYGDTPEWIQRQ

SEQ ID NO: 2216 - protein, 15 aa, Human papillomavirus
QWAFDNEVTDDSQIA

SEQ ID NO: 2217 - protein, 15 aa, Human papillomavirus
DNEVTDDSQIAFQYA

SEQ ID NO: 2218 - protein, 15 aa, Human papillomavirus
QAKYVKDCGIMCRHY

SEQ ID NO: 2219 - protein, 15 aa, Human papillomavirus
KLGLLDDATEICWKY

SEQ ID NO: 2220 - protein, 15 aa, Human papillomavirus
CWKYIDDYLRNLVDG

SEQ ID NO: 2221 - protein, 15 aa, Human papillomavirus
QNPFPLDNNGNPVYE

SEQ ID NO: 2222 - protein, 15 aa, Human papillomavirus
WSRLNLDNDEDKENN

SEQ ID NO: 2223 - protein, 15 aa, Human papillomavirus
RLNLDNDEDKENNGD

SEQ ID NO: 2224 - protein, 15 aa, Human papillomavirus
GDNISDDEDETADDS

SEQ ID NO: 2225 - protein, 15 aa, Human papillomavirus
LIEFIDDSVQSTTQA

SEQ ID NO: 2226 - protein, 15 aa, Human papillomavirus
RKIIELEDSGYGNTE

SEQ ID NO: 2227 - protein, 15 aa, Human papillomavirus
NTEVETEQMAHQVES

SEQ ID NO: 2228 - protein, 15 aa, Human papillomavirus
SSDVSSETDVDSCNT

SEQ ID NO: 2229 - protein, 15 aa, Human papillomavirus
LQCLTCDRGIILLLL

SEQ ID NO: 2230 - protein, 15 aa, Human papillomavirus
ETCMIIEPPKLRSQA

SEQ ID NO: 2231 - protein, 15 aa, Human papillomavirus
QHSFNDDIFDLSEMI

SEQ ID NO: 2232 - protein, 15 aa, Human papillomavirus
QWAYDNDITDDSDIA

SEQ ID NO: 2233 - protein, 15 aa, Human papillomavirus
DNDITDDSDIAYKYA

SEQ ID NO: 2234 - protein, 15 aa, Human papillomavirus
QAKIVKDCGVMCRHY

SEQ ID NO: 2235 - protein, 15 aa, Human papillomavirus
KLGMIDDVTAISWTY

SEQ ID NO: 2236 - protein, 15 aa, Human papillomavirus
NNPFPFDANGNPVYK

SEQ ID NO: 2237 - protein, 15 aa, Human papillomavirus
VYKINDENWKSFFSR

SEQ ID NO: 2238 - protein, 15 aa, Human papillomavirus
KLGLIEEEDKENDGG

SEQ ID NO: 2239 - protein, 15 aa, Human papillomavirus
RLNVCQDKILTHYEN

SEQ ID NO: 2240 - protein, 15 aa, Human papillomavirus
LTHYENDSTDLRDHI

SEQ ID NO: 2241 - protein, 15 aa, Human papillomavirus
WKHMRLECAIYYKAR

SEQ ID NO: 2242 - protein, 15 aa, Human papillomavirus
ELQLTLETIYNSQYS

SEQ ID NO: 2243 - protein, 15 aa, Human papillomavirus
NSQYSNEKWTLQDVS

SEQ ID NO: 2244 - protein, 15 aa, Human papillomavirus
LQDVSLEVYLTAPTG

SEQ ID NO: 2245 - protein, 15 aa, Human papillomavirus
KHGYTVEVQFDGDIC

SEQ ID NO: 2246 - protein, 15 aa, Human papillomavirus
TVEVQFDGDICNTMH

SEQ ID NO: 2247 - protein, 15 aa, Human papillomavirus
EVQFDGDICNTMHYT

SEQ ID NO: 2248 - protein, 15 aa, Human papillomavirus
THIYICEEASVTVVE

SEQ ID NO: 2249 - protein, 15 aa, Human papillomavirus
HIYICEEASVTVVEG

SEQ ID NO: 2250 - protein, 15 aa, Human papillomavirus
GLYYVHEGIRTYFVQ

SEQ ID NO: 2251 - protein, 15 aa, Human papillomavirus
FVQFKDDAEKYSKNK

SEQ ID NO: 2252 - protein, 15 aa, Human papillomavirus
AVALGTEETQTTIQR

SEQ ID NO: 2253 - protein, 15 aa, Human papillomavirus
TKLLHRDSVDSAPIL

SEQ ID NO: 2254 - protein, 15 aa, Human papillomavirus
IVHLKGDANTLKCLR

SEQ ID NO: 2255 - protein, 15 aa, Human papillomavirus
IVTLTYDSEWQRDQF

SEQ ID NO: 2256 - protein, 15 aa, Human papillomavirus
TLTYDSEWQRDQFLS

SEQ ID NO: 2257 - protein, 15 aa, Human papillomavirus
WQLIRWENAIFFAAR

SEQ ID NO: 2258 - protein, 15 aa, Human papillomavirus
QSRYKTEDWTLQDTC

SEQ ID NO: 2259 - protein, 15 aa, Human papillomavirus
TVQVYFDGNKDNCMT

SEQ ID NO: 2260 - protein, 15 aa, Human papillomavirus
MTYVAWDSVYYMTDA

SEQ ID NO: 2261 - protein, 15 aa, Human papillomavirus
SVYYMTDAGTWDKTA

SEQ ID NO: 2262 - protein, 15 aa, Human papillomavirus
GLYYVKEGYNTFYIE

SEQ ID NO: 2263 - protein, 15 aa, Human papillomavirus
YIEFKSECEKYGNTG

SEQ ID NO: 2264 - protein, 15 aa, Human papillomavirus
IIHLKGDRNSLKCLR

SEQ ID NO: 2265 - protein, 15 aa, Human papillomavirus
TVTYHSETQRTKFLN

SEQ ID NO: 2266 - protein, 15 aa, Human papillomavirus
RLNVCQDKILEHYEN

SEQ ID NO: 2267 - protein, 15 aa, Human papillomavirus
WKHIRLECVLMYKAR

SEQ ID NO: 2268 - protein, 15 aa, Human papillomavirus
ELQMMLETLNNTEYK

SEQ ID NO: 2269 - protein, 15 aa, Human papillomavirus
NTEYKNEDWTMQQTS

SEQ ID NO: 2270 - protein, 15 aa, Human papillomavirus
KHGYTVEVQFDGDVH

SEQ ID NO: 2271 - protein, 15 aa, Human papillomavirus
TVEVQFDGDVHNTMH

SEQ ID NO: 2272 - protein, 15 aa, Human papillomavirus
FIYLCIDGQCTVVEG

SEQ ID NO: 2273 - protein, 15 aa, Human papillomavirus
QVIVFPESVFSSDEI

SEQ ID NO: 2274 - protein, 15 aa, Human papillomavirus
ESVFSSDEISFAGIV

SEQ ID NO: 2275 - protein, 15 aa, Human papillomavirus
NKLLRGDSVDSVNCG

SEQ ID NO: 2276 - protein, 15 aa, Human papillomavirus
IIHLKGDANILKCLR

SEQ ID NO: 2277 - protein, 15 aa, Human papillomavirus
LDLYEADKTDLPSQI

SEQ ID NO: 2278 - protein, 15 aa, Human papillomavirus
WKLIRMECALLYTAK

SEQ ID NO: 2279 - protein, 15 aa, Human papillomavirus
ELQMALETLSKSQYS

SEQ ID NO: 2280 - protein, 15 aa, Human papillomavirus
TVTVQYDNDKKNTMD

SEQ ID NO: 2281 - protein, 15 aa, Human papillomavirus
GEIYIIEEDTCTMVT

SEQ ID NO: 2282 - protein, 15 aa, Human papillomavirus
EIYIIEEDTCTMVTG

SEQ ID NO: 2283 - protein, 15 aa, Human papillomavirus
IYIIEEDTCTMVTGK

SEQ ID NO: 2284 - protein, 15 aa, Human papillomavirus
YFKYFKEDAAKYSKT

SEQ ID NO: 2285 - protein, 15 aa, Human papillomavirus
FKYFKEDAAKYSKTQ

SEQ ID NO: 2286 - protein, 15 aa, Human papillomavirus
TADIQTDNDNRPPQA

SEQ ID NO: 2287 - protein, 15 aa, Human papillomavirus
TKLFCADPALDNRTA

SEQ ID NO: 2288 - protein, 15 aa, Human papillomavirus
IVHLKGESNSLKCLR

SEQ ID NO: 2289 - protein, 15 aa, Human papillomavirus
TVTFVTEQQQQMFLG

SEQ ID NO: 2290 - protein, 15 aa, Human papillomavirus
WQLIRLENAILFTAR

SEQ ID NO: 2291 - protein, 15 aa, Human papillomavirus
QSKYNNEEWTLQDTC

SEQ ID NO: 2292 - protein, 15 aa, Human papillomavirus
TVHVYFDGNKDNCMN

SEQ ID NO: 2293 - protein, 15 aa, Human papillomavirus
MNYVVWDSIYYITET

SEQ ID NO: 2294 - protein, 15 aa, Human papillomavirus
SIYYITETGIWDKTA

SEQ ID NO: 2295 - protein, 15 aa, Human papillomavirus
GVYYIKDGDTTYYVQ

SEQ ID NO: 2296 - protein, 15 aa, Human papillomavirus
YVQFKSECEKYGNSN

SEQ ID NO: 2297 - protein, 15 aa, Human papillomavirus
IIHLKGDKNSLKCLR

SEQ ID NO: 2298 - protein, 15 aa, Human papillomavirus
TVTYNSEVQRNTFLD

SEQ ID NO: 2299 - protein, 15 aa, Human papillomavirus
LDLYEADSNDLNAQI

SEQ ID NO: 2300 - protein, 15 aa, Human papillomavirus
ELQLALEALNKTQYS

SEQ ID NO: 2301 - protein, 15 aa, Human papillomavirus
KTQYSTDGWTLQQTS

SEQ ID NO: 2302 - protein, 15 aa, Human papillomavirus
TITVQYDNDKNNTMD

SEQ ID NO: 2303 - protein, 15 aa, Human papillomavirus
TVQYDNDKNNTMDYT

SEQ ID NO: 2304 - protein, 15 aa, Human papillomavirus
EIYLLGECECTIVEG

SEQ ID NO: 2305 - protein, 15 aa, Human papillomavirus
GLYYWCDGEKIYFVK

SEQ ID NO: 2306 - protein, 15 aa, Human papillomavirus
AVHLCTETSKTSAVS

SEQ ID NO: 2307 - protein, 15 aa, Human papillomavirus
IIHLKGDPNSLKCLR

SEQ ID NO: 2308 - protein, 15 aa, Human papillomavirus
TITYSDETQRQQFLK

SEQ ID NO: 2309 - protein, 15 aa, Human papillomavirus
WKAVRHENVLYYKAR

SEQ ID NO: 2310 - protein, 15 aa, Human papillomavirus
EVQIALESLSTTIYN

SEQ ID NO: 2311 - protein, 15 aa, Human papillomavirus
TTIYNNEEWTLRDTC

SEQ ID NO: 2312 - protein, 15 aa, Human papillomavirus
KKCFKKEGQHIEVWF

SEQ ID NO: 2313 - protein, 15 aa, Human papillomavirus
HIEVWFDGSKNNCMQ

SEQ ID NO: 2314 - protein, 15 aa, Human papillomavirus
YIYYNGDCGWQKVCS

SEQ ID NO: 2315 - protein, 15 aa, Human papillomavirus
HKTYYTDFEQEAKKF

SEQ ID NO: 2316 - protein, 15 aa, Human papillomavirus
IWEVHMENESIYCPD

SEQ ID NO: 2317 - protein, 15 aa, Human papillomavirus
EVHMENESIYCPDSV

SEQ ID NO: 2318 - protein, 15 aa, Human papillomavirus
ESIYCPDSVSSTCRY

SEQ ID NO: 2319 - protein, 15 aa, Human papillomavirus
VVHLKGEPNRLKCCR

SEQ ID NO: 2320 - protein, 15 aa, Human papillomavirus
YKTLFVDVTSTYHWT

SEQ ID NO: 2321 - protein, 15 aa, Human papillomavirus
ITIIYKDETQRNSFL

SEQ ID NO: 2322 - protein, 15 aa, Human papillomavirus
TIIYKDETQRNSFLS

SEQ ID NO: 2323 - protein, 15 aa, Human papillomavirus
LDIYEADKNDLTSQI

SEQ ID NO: 2324 - protein, 15 aa, Human papillomavirus
WKLIRMECAIMYTAR

SEQ ID NO: 2325 - protein, 15 aa, Human papillomavirus
ELQMALETLNASPYK

SEQ ID NO: 2326 - protein, 15 aa, Human papillomavirus
ASPYKTDEWTLQQTS

SEQ ID NO: 2327 - protein, 15 aa, Human papillomavirus
TVTVQYDNDKANTMD

SEQ ID NO: 2328 - protein, 15 aa, Human papillomavirus
TVQYDNDKANTMDYT

SEQ ID NO: 2329 - protein, 15 aa, Human papillomavirus
SEIYIIEETTCTLVA

SEQ ID NO: 2330 - protein, 15 aa, Human papillomavirus
EIYIIEETTCTLVAG

SEQ ID NO: 2331 - protein, 15 aa, Human papillomavirus
CTLVAGEVDYVGLYY

SEQ ID NO: 2332 - protein, 15 aa, Human papillomavirus
YFKYFKEDAKKYSKT

SEQ ID NO: 2333 - protein, 15 aa, Human papillomavirus
PTSIPSDQISTTETA

SEQ ID NO: 2334 - protein, 15 aa, Human papillomavirus
IVHLKGDPNSLKCLR

SEQ ID NO: 2335 - protein, 15 aa, Human papillomavirus
TVTYTTETQRQLFLN

SEQ ID NO: 2336 - protein, 15 aa, Human papillomavirus
ECVYCKQQLLRREVY

SEQ ID NO: 2337 - protein, 15 aa, Human papillomavirus
CIVYRDGNPYAVCDK

SEQ ID NO: 2338 - protein, 15 aa, Human papillomavirus
HYCYSLYGTTLEQQY

SEQ ID NO: 2339 - protein, 15 aa, Human papillomavirus
CYSLYGTTLEQQYNK

SEQ ID NO: 2340 - protein, 15 aa, Human papillomavirus
EQQYNKPLCDLLIRC

SEQ ID NO: 2341 - protein, 15 aa, Human papillomavirus
IRCINCQKPLCPEEK

SEQ ID NO: 2342 - protein, 15 aa, Human papillomavirus
NTSLQDIEITCVYCK

SEQ ID NO: 2343 - protein, 15 aa, Human papillomavirus
VFEFAFKDLFVVYRD

SEQ ID NO: 2344 - protein, 15 aa, Human papillomavirus
EFAFKDLFVVYRDSI

SEQ ID NO: 2345 - protein, 15 aa, Human papillomavirus
DLFVVYRDSIPHAAC

SEQ ID NO: 2346 - protein, 15 aa, Human papillomavirus
FVVYRDSIPHAACHK

SEQ ID NO: 2347 - protein, 15 aa, Human papillomavirus
NTGLYNLLIRCLRCQ

SEQ ID NO: 2348 - protein, 15 aa, Human papillomavirus
IRCLRCQKPLNPAEK

SEQ ID NO: 2349 - protein, 15 aa, Human papillomavirus
PRKLHELSSALEIPY

SEQ ID NO: 2350 - protein, 15 aa, Human papillomavirus
EIPYDELRLNCVYCK

SEQ ID NO: 2351 - protein, 15 aa, Human papillomavirus
NCVYCKGQLTETEVL

SEQ ID NO: 2352 - protein, 15 aa, Human papillomavirus
TEVLDFAFTDLTIVY

SEQ ID NO: 2353 - protein, 15 aa, Human papillomavirus
VLDFAFTDLTIVYRD

SEQ ID NO: 2354 - protein, 15 aa, Human papillomavirus
DFAFTDLTIVYRDDT

SEQ ID NO: 2355 - protein, 15 aa, Human papillomavirus
TIVYRDDTPHGVCTK

SEQ ID NO: 2356 - protein, 15 aa, Human papillomavirus
WYRYSVYGTTLEKLT

SEQ ID NO: 2357 - protein, 15 aa, Human papillomavirus
CDLLIRCITCQRPLC

SEQ ID NO: 2358 - protein, 15 aa, Human papillomavirus
ETTIHNIELQCVECK

SEQ ID NO: 2359 - protein, 15 aa, Human papillomavirus
SEVYDFAFADLTVVY

SEQ ID NO: 2360 - protein, 15 aa, Human papillomavirus
VYDFAFADLTVVYRE

SEQ ID NO: 2361 - protein, 15 aa, Human papillomavirus
DFAFADLTVVYREGN

SEQ ID NO: 2362 - protein, 15 aa, Human papillomavirus
TVVYREGNPFGICKL

SEQ ID NO: 2363 - protein, 15 aa, Human papillomavirus
GNPFGICKLCLRFLS

SEQ ID NO: 2364 - protein, 15 aa, Human papillomavirus
NYSVYGNTLEQTVKK

SEQ ID NO: 2365 - protein, 15 aa, Human papillomavirus
KKPLNEILIRCIICQ

SEQ ID NO: 2366 - protein, 15 aa, Human papillomavirus
NEILIRCIICQRPLC

SEQ ID NO: 2367 - protein, 15 aa, Human papillomavirus
IRCIICQRPLCPQEK

SEQ ID NO: 2368 - protein, 15 aa, Human papillomavirus
NTSLQDVSIACVYCK

SEQ ID NO: 2369 - protein, 15 aa, Human papillomavirus
ACVYCKATLERTEVY

SEQ ID NO: 2370 - protein, 15 aa, Human papillomavirus
CIVYRDCIAYAACHK

SEQ ID NO: 2371 - protein, 15 aa, Human papillomavirus
RDCIAYAACHKCIDF

SEQ ID NO: 2372 - protein, 15 aa, Human papillomavirus
SNSVYGETLEKITNT

SEQ ID NO: 2373 - protein, 15 aa, Human papillomavirus
NTELYNLLIRCLRCQ

SEQ ID NO: 2374 - protein, 15 aa, Human papillomavirus
IRCLRCQKPLNPAEK

SEQ ID NO: 2375 - protein, 15 aa, Human papillomavirus
REVYKFLFTDLRIVY

SEQ ID NO: 2376 - protein, 15 aa, Human papillomavirus
RIVYRDNNPYGVCIM

SEQ ID NO: 2377 - protein, 15 aa, Human papillomavirus
NNPYGVCIMCLRFLS

SEQ ID NO: 2378 - protein, 15 aa, Human papillomavirus
EERVKKPLSEITIRC

SEQ ID NO: 2379 - protein, 15 aa, Human papillomavirus
IRCIICQTPLCPEEK

SEQ ID NO: 2380 - protein, 15 aa, Human papillomavirus
SEVLEIPLIDLRLSC

SEQ ID NO: 2381 - protein, 15 aa, Human papillomavirus
EIPLIDLRLSCVYCK

SEQ ID NO: 2382 - protein, 15 aa, Human papillomavirus
SCVYCKKELTRAEVY

SEQ ID NO: 2383 - protein, 15 aa, Human papillomavirus
VYNFACTELKLVYRD

SEQ ID NO: 2384 - protein, 15 aa, Human papillomavirus
VCLLFYSKVRKYRYY

SEQ ID NO: 2385 - protein, 15 aa, Human papillomavirus
YYDYSVYGATLESIT

SEQ ID NO: 2386 - protein, 15 aa, Human papillomavirus
DYSVYGATLESITKK

SEQ ID NO: 2387 - protein, 15 aa, Human papillomavirus
IRCYRCQSPLTPEEK

SEQ ID NO: 2388 - protein, 15 aa, Human papillomavirus
VYDFVFADLRIVYRD

SEQ ID NO: 2389 - protein, 15 aa, Human papillomavirus
DFVFADLRIVYRDGN

SEQ ID NO: 2390 - protein, 15 aa, Human papillomavirus
RIVYRDGNPFAVCKV

SEQ ID NO: 2391 - protein, 15 aa, Human papillomavirus
GNPFAVCKVCLRLLS

SEQ ID NO: 2392 - protein, 15 aa, Human papillomavirus
NYSLYGDTLEQTLKK

SEQ ID NO: 2393 - protein, 15 aa, Human papillomavirus
KKCLNEILIRCIICQ

SEQ ID NO: 2394 - protein, 15 aa, Human papillomavirus
NEILIRCIICQRPLC

SEQ ID NO: 2395 - protein, 15 aa, Human papillomavirus
IRCIICQRPLCPQEK

SEQ ID NO: 2396 - protein, 15 aa, Human papillomavirus
HEYMLDLQPETTDLY

SEQ ID NO: 2397 - protein, 15 aa, Human papillomavirus
TLRLCVQSTHVDIRT

SEQ ID NO: 2398 - protein, 15 aa, Human papillomavirus
IRTLEDLLMGTLGIV

SEQ ID NO: 2399 - protein, 15 aa, Human papillomavirus
LEDLLMGTLGIVCPI

SEQ ID NO: 2400 - protein, 15 aa, Human papillomavirus
DLLMGTLGIVCPICS

SEQ ID NO: 2401 - protein, 15 aa, Human papillomavirus
KATLQDIVLHLEPQN

SEQ ID NO: 2402 - protein, 15 aa, Human papillomavirus
IDGVNHQHLPARRAE

SEQ ID NO: 2403 - protein, 15 aa, Human papillomavirus
LRAFQQLFLNTLSFV

SEQ ID NO: 2404 - protein, 15 aa, Human papillomavirus
FQQLFLNTLSFVCPW

SEQ ID NO: 2405 - protein, 15 aa, Human papillomavirus
QDYVLDLQPEATDLH

SEQ ID NO: 2406 - protein, 15 aa, Human papillomavirus
EEDVIDSPAGQAEPD

SEQ ID NO: 2407 - protein, 15 aa, Human papillomavirus
DIRILQELLMGSFGI

SEQ ID NO: 2408 - protein, 15 aa, Human papillomavirus
IRILQELLMGSFGIV

SEQ ID NO: 2409 - protein, 15 aa, Human papillomavirus
ELLMGSFGIVCPNCS

SEQ ID NO: 2410 - protein, 15 aa, Human papillomavirus
KEYVLDLYPEPTDLY

SEQ ID NO: 2411 - protein, 15 aa, Human papillomavirus
LRTIQQLLMGTVNIV

SEQ ID NO: 2412 - protein, 15 aa, Human papillomavirus
IQQLLMGTVNIVCPT

SEQ ID NO: 2413 - protein, 15 aa, Human papillomavirus
QLLMGTVNIVCPTCA

SEQ ID NO: 2414 - protein, 15 aa, Human papillomavirus
RETLQEIVLHLEPQN

SEQ ID NO: 2415 - protein, 15 aa, Human papillomavirus
ADGVSHAQLPARRAE

SEQ ID NO: 2416 - protein, 15 aa, Human papillomavirus
LRTLQQLFLSTLSFV

SEQ ID NO: 2417 - protein, 15 aa, Human papillomavirus
LQQLFLSTLSFVCPW

SEQ ID NO: 2418 - protein, 15 aa, Human papillomavirus
KDYILDLQPETTDLH

SEQ ID NO: 2419 - protein, 15 aa, Human papillomavirus
LRTLQQMLLGTLQVV

SEQ ID NO: 2420 - protein, 15 aa, Human papillomavirus
LQQMLLGTLQVVCPG

SEQ ID NO: 2421 - protein, 15 aa, Human papillomavirus
QMLLGTLQVVCPGCA

SEQ ID NO: 2422 - protein, 15 aa, Human papillomavirus
VPTLQDVVLELTPQT

SEQ ID NO: 2423 - protein, 15 aa, Human papillomavirus
LQDVVLELTPQTEID

SEQ ID NO: 2424 - protein, 15 aa, Human papillomavirus
QDVVLELTPQTEIDL

SEQ ID NO: 2425 - protein, 15 aa, Human papillomavirus
CKFVVQLDIQSTKED

SEQ ID NO: 2426 - protein, 15 aa, Human papillomavirus
VVQLDIQSTKEDLRV

SEQ ID NO: 2427 - protein, 15 aa, Human papillomavirus
DLRVVQQLLMGALTV

SEQ ID NO: 2428 - protein, 15 aa, Human papillomavirus
LRVVQQLLMGALTVT

SEQ ID NO: 2429 - protein, 15 aa, Human papillomavirus
VQQLLMGALTVTCPL

SEQ ID NO: 2430 - protein, 15 aa, Human papillomavirus
QQLLMGALTVTCPLC

SEQ ID NO: 2431 - protein, 15 aa, Human papillomavirus
QLLMGALTVTCPLCA

SEQ ID NO: 2432 - protein, 15 aa, Human papillomavirus
REYILDLHPEPTDLF

SEQ ID NO: 2433 - protein, 15 aa, Human papillomavirus
TCCYTCGTTVRLCIN

SEQ ID NO: 2434 - protein, 15 aa, Human papillomavirus
VRTLQQLLMGTCTIV

SEQ ID NO: 2435 - protein, 15 aa, Human papillomavirus
LQQLLMGTCTIVCPS

SEQ ID NO: 2436 - protein, 15 aa, Human papillomavirus
QLLMGTCTIVCPSCA

SEQ ID NO: 2437 - protein, 15 aa, Human papillomavirus
RTAMFQDPQERPRKL

SEQ ID NO: 2438 - protein, 15 aa, Human papillomavirus
LPQLCTELQTTIHDI

SEQ ID NO: 2439 - protein, 15 aa, Human papillomavirus
CTELQTTIHDIILEC

SEQ ID NO: 2440 - protein, 15 aa, Human papillomavirus
IHDIILECVYCKQQL

SEQ ID NO: 2441 - protein, 15 aa, Human papillomavirus
QQLLRREVYDFAFRD

SEQ ID NO: 2442 - protein, 15 aa, Human papillomavirus
LCIVYRDGNPYAVCD

SEQ ID NO: 2443 - protein, 15 aa, Human papillomavirus
QKPLCPEEKQRHLDK

SEQ ID NO: 2444 - protein, 15 aa, Human papillomavirus
LPDLCTELNTSLQDI

SEQ ID NO: 2445 - protein, 15 aa, Human papillomavirus
LFVVYRDSIPHAACH

SEQ ID NO: 2446 - protein, 15 aa, Human papillomavirus
SDSVYGDTLEKLTNT

SEQ ID NO: 2447 - protein, 15 aa, Human papillomavirus
AGHYRGQCHSCCNRA

SEQ ID NO: 2448 - protein, 15 aa, Human papillomavirus
ALEIPYDELRLNCVY

SEQ ID NO: 2449 - protein, 15 aa, Human papillomavirus
LTIVYRDDTPHGVCT

SEQ ID NO: 2450 - protein, 15 aa, Human papillomavirus
TIVYRDDTPHGVCTK

SEQ ID NO: 2451 - protein, 15 aa, Human papillomavirus
QRPLCPEEKQRHLDK

SEQ ID NO: 2452 - protein, 15 aa, Human papillomavirus
CQALETTIHNIELQC

SEQ ID NO: 2453 - protein, 15 aa, Human papillomavirus
LTVVYREGNPFGICK

SEQ ID NO: 2454 - protein, 15 aa, Human papillomavirus
GNTLEQTVKKPLNEI

SEQ ID NO: 2455 - protein, 15 aa, Human papillomavirus
QRPLCPQEKKRHVDL

SEQ ID NO: 2456 - protein, 15 aa, Human papillomavirus
KRHVDLNKRFHNISG

SEQ ID NO: 2457 - protein, 15 aa, Human papillomavirus
LPDLCTELNTSLQDV

SEQ ID NO: 2458 - protein, 15 aa, Human papillomavirus
LCIVYRDCIAYAACH

SEQ ID NO: 2459 - protein, 15 aa, Human papillomavirus
SNSVYGETLEKITNT

SEQ ID NO: 2460 - protein, 15 aa, Human papillomavirus
FHSIAGQYRGQCNTC

SEQ ID NO: 2461 - protein, 15 aa, Human papillomavirus
LCEVLEESVHEIRLQ

SEQ ID NO: 2462 - protein, 15 aa, Human papillomavirus
CEVLEESVHEIRLQC

SEQ ID NO: 2463 - protein, 15 aa, Human papillomavirus
YKFLFTDLRIVYRDN

SEQ ID NO: 2464 - protein, 15 aa, Human papillomavirus
LRIVYRDNNPYGVCI

SEQ ID NO: 2465 - protein, 15 aa, Human papillomavirus
QTPLCPEEKERHVNA

SEQ ID NO: 2466 - protein, 15 aa, Human papillomavirus
ERHVNANKRFHNIMG

SEQ ID NO: 2467 - protein, 15 aa, Human papillomavirus
YNFACTELKLVYRDD

SEQ ID NO: 2468 - protein, 15 aa, Human papillomavirus
LKLVYRDDFPYAVCR

SEQ ID NO: 2469 - protein, 15 aa, Human papillomavirus
KLVYRDDFPYAVCRV

SEQ ID NO: 2470 - protein, 15 aa, Human papillomavirus
QSPLTPEEKQLHCDR

SEQ ID NO: 2471 - protein, 15 aa, Human papillomavirus
EKQLHCDRKRRFHLI

SEQ ID NO: 2472 - protein, 15 aa, Human papillomavirus
CQALETSVHEIELKC

SEQ ID NO: 2473 - protein, 15 aa, Human papillomavirus
YDFVFADLRIVYRDG

SEQ ID NO: 2474 - protein, 15 aa, Human papillomavirus
LRIVYRDGNPFAVCK

SEQ ID NO: 2475 - protein, 15 aa, Human papillomavirus
NYSLYGDTLEQTLKK

SEQ ID NO: 2476 - protein, 15 aa, Human papillomavirus
GDTLEQTLKKCLNEI

SEQ ID NO: 2477 - protein, 15 aa, Human papillomavirus
QRPLCPQEKKRHVDL

SEQ ID NO: 2478 - protein, 15 aa, Human papillomavirus
KRHVDLNKRFHNISG

SEQ ID NO: 2479 - protein, 15 aa, Human papillomavirus
LHEYMLDLQPETTDL

SEQ ID NO: 2480 - protein, 15 aa, Human papillomavirus
MLDLQPETTDLYCYE

SEQ ID NO: 2481 - protein, 15 aa, Human papillomavirus
TDLYCYEQLNDSSEE

SEQ ID NO: 2482 - protein, 15 aa, Human papillomavirus
DIVLHLEPQNEIPVD

SEQ ID NO: 2483 - protein, 15 aa, Human papillomavirus
QNEIPVDLLCHEQLS

SEQ ID NO: 2484 - protein, 15 aa, Human papillomavirus
VDLLCHEQLSDSEEE

SEQ ID NO: 2485 - protein, 15 aa, Human papillomavirus
ARRAEPQRHTMLCMC

SEQ ID NO: 2486 - protein, 15 aa, Human papillomavirus
RIELVVESSADDLRA

SEQ ID NO: 2487 - protein, 15 aa, Human papillomavirus
LQDYVLDLQPEATDL

SEQ ID NO: 2488 - protein, 15 aa, Human papillomavirus
VLDLQPEATDLHCYE

SEQ ID NO: 2489 - protein, 15 aa, Human papillomavirus
IVTFCCQCKSTLRLC

SEQ ID NO: 2490 - protein, 15 aa, Human papillomavirus
DIRILQELLMGSFGI

SEQ ID NO: 2491 - protein, 15 aa, Human papillomavirus
LKEYVLDLYPEPTDL

SEQ ID NO: 2492 - protein, 15 aa, Human papillomavirus
VLDLYPEPTDLYCYE

SEQ ID NO: 2493 - protein, 15 aa, Human papillomavirus
TDLYCYEQLSDSSDE

SEQ ID NO: 2494 - protein, 15 aa, Human papillomavirus
EIVLHLEPQNELDPV

SEQ ID NO: 2495 - protein, 15 aa, Human papillomavirus
VDLLCYEQLSESEEE

SEQ ID NO: 2496 - protein, 15 aa, Human papillomavirus
ARRAEPQRHKILCVC

SEQ ID NO: 2497 - protein, 15 aa, Human papillomavirus
RIELTVESSAEDLRT

SEQ ID NO: 2498 - protein, 15 aa, Human papillomavirus
IKDYILDLQPETTDL

SEQ ID NO: 2499 - protein, 15 aa, Human papillomavirus
ILDLQPETTDLHCYE

SEQ ID NO: 2500 - protein, 15 aa, Human papillomavirus
LQDVVLELTPQTEID

SEQ ID NO: 2501 - protein, 15 aa, Human papillomavirus
KFVVQLDIQSTKEDL

SEQ ID NO: 2502 - protein, 15 aa, Human papillomavirus
LREYILDLHPEPTDL

SEQ ID NO: 2503 - protein, 15 aa, Human papillomavirus
ILDLHPEPTDLFCYE

SEQ ID NO: 2504 - protein, 15 aa, Human papillomavirus
TDLFCYEQLCDSSDE

SEQ ID NO: 2505 - protein, 15 aa, Human papillomavirus
EDEIGLDGPDGQAQP

SEQ ID NO: 2506 - protein, 647 aa, Human papillomavirus
ADPAGTNGEEGTGCNGWFYVEAVVEKKTGDAISDDENENDSDTGEDLVDFIVNDNDYLTQAETETAHALFTAQEAKQHRDAVQVLKRKYLGSPLSDISGCVDNNISPRLKAICIEKQSRAAKRRLFESEDSGYGNTEVETQQMLQEGRHETETPCSQYSGGSGGGCSQYSSGSGGEGVSERHTICQTPLTNILNVLKTSNAKAAMLAKFKELYGVSFSELVRPFKSNKSTCCDWCIAAFGLTPSIADSIKTLLQQYCLYLHIQSLACSWGMVVLLLVRYKCGKNRETIEKLLSKLLCVSPMCMMIEPPKLRSTAAALYWYKTGISNISEVYGDTPEWIQRQTVLQHSFNDCTFELSQMVQWAYDNDIVDDSEIAYKYAQLADTNSNASAFLKSNSQAKIVKDCATMCRHYKRAEKKQMSMSQWIKYRCDRVDDGGDWKQIVMFLRYQGVEFMSFLTALKRFLQGIPKKNCILLYGAANTGKSLFGMSLMKFLQGSVICFVNSKSHFWLQPLADAKIGMLDDATVPCWNYIDDNLRNALDGNLVSMDVKHRPLVQLKCPPLLITSNINAGTDSRWPYLHNRLVVFTFPNEFPFDENGNPVYELNDKNWKSFFSRTWSRLSLHEDEDKENDGDSLPTFKCVSGQNTNTL

SEQ ID NO: 2507 - protein, 657 aa, Human papillomavirus
MADPEGTDGEGTGCNGWFYVQAIVDKKTGDVISDDEDENATDTGSDMVDFIDTQGTFCEQAELETAQALFHAQEVHNDAQVLHVLKRKFAGGSTENSPLGERLEVDTELSPRLQEISLNSGQKKAKRRLFTISDSGYGCSEVEATQIQVTTNGEHGGNVCSGGSTEAIDNGGTEGNNSSVDGTSDNSNIENVNPQCTIAQLKDLLKVNNKQGAMLAVFKDTYGLSFTDLVRNFKSDKTTCTDWVTAIFGVNPTIAEGFKTLIQPFILYAHIQCLDCKWGVLILALLRYKCGKSRLTVAKGLSTLLHVPETCMLIQPPKLRSSVAALYWYRTGISNISEVMGDTPEWIQRLTIIQHGIDDSNFDLSEMVQWAFDNELTDESDMAFEYALLADSNSNAAAFLKSNCQAKYLKDCATMCKHYRRAQKRQMNMSQWIRFRCSKIDEGGDWRPIVQFLRYQQIEFITFLGALKSFLKGTPKKNCLVFCGPANTGKSYFGMSFIHFIQGAVISFVNSTSHFWLEPLTDTKVAMLDDATTTCWTYFDTYMRNALDGNPISIDRKHKPLIQLKCPPILLTTNIHPAKDNRWPYLESRITVFEFPNAFPFDKNGNPVYEINDKNWKCFFERTWSRLDLHEEEEDADTEGNPFGTFKCVAGQNHRPL

SEQ ID NO: 2508 - protein, 629 aa, Human papillomavirus; identical to SEQ ID NO: 47

SEQ ID NO: 2509 - protein, 644 aa, Human papillomavirus; identical to SEQ ID NO: 54

SEQ ID NO: 2510 - protein, 643 aa, Human papillomavirus; identical to SEQ ID NO: 61

SEQ ID NO: 2511 - protein, 647 aa, Human papillomavirus; identical to SEQ ID NO: 67

SEQ ID NO: 2512 - protein, 636 aa, Human papillomavirus
MASPEGTDGEGKGCCGWFEVEAIVEKKTGDKISDDESDEEDEIDTDLDGFIDDSYIQNIQADAETGQQLLQVQTAHADKQTLQKLKRKYIASPLRDISNQQTVCREGVKRRLILSDLQDSGYGNTLETLETPEQVDEEVQGRGCGNTQNGGSQNSTYSNNSEDSVIHMDIDRNNETPTQQLQDLFKSSNLQGKLYYKFKEVYGIPFSELVRTFKSDSTCCNDWICAIFGVNETLAEALKTIIKPHCMYYHMQCLTCTWGVIVMMLIRYTCGKNRKTIAKALSSILNVPQEQMLIQPPKIRSPAVALYFYKTAMSNISDVYGDTPEWIQRQTQLQHSLQDSQFELSKMVQWAFDNEVTDDSQIAFQYAQLADVDSNAQAFLKSNMQAKYVKDCGIMCRHYKRAQQQQMNMCQWIKHICSKTDEGGDWKPIVQFLRYQGVDFISFLSYFKLFLQGTPKHNCLVLCGPPNTGKSCFAMSLIKFFQGSVISFVNSQSHFWLQPLDNAKLGLLDDATEICWKYIDDYLRNLVDGNPISLDRKHKQLVQIKCPPLLITTNINPMLDAKLRYLHSRMLVFQFQNPFPLDNNGNPVYELSNVNWKCFFTRTWSRLNLDNDEDKENNGDAFPTFKCVPEQNTRLF

SEQ ID NO: 2513 - protein, 644 aa, Human papillomavirus; identical to SEQ ID NO: 78

SEQ ID NO: 2514 - protein, 365 aa, Human papillomavirus; identical to SEQ ID NO: 34

SEQ ID NO: 2515 - protein, 365 aa, Human papillomavirus
MQTPKETLSERLSALQDKIIDHYENDSKDIDSQIQYWQLIRWENAIFFAAREHGIQTLNHQVVPAYNISKSKAHKAIELQMALQGLAQSAYKTEDWTLQDTCEELWNTEPTHCFKKGGQTVQVYFDGNKDNCMTYVAWDSVYYMTDAGTWDKTATCVSHRGLYYVKEGYNTFYIEFKSECEKYGNTGTWEVHFGNNVIDCNDSMCSTSDDTVSATQLVKQLQHTPSPYSSTVSVGTAKTYGQTSAATRPGHCGLAEKQHCGPVNPLLGAATPTGNNKRRKLCSGNTTPIIHLKGDRNSLKCLRYRLRKHSDHYRDISSTWHWTGAGNEKTGILTVTYHSETQRTKFLNTVAIPDSVQILVGYMTM

SEQ ID NO: 2516 - protein, 372 aa, Human papillomavirus; identical to SEQ ID NO: 48

SEQ ID NO: 2517 - protein, 353 aa, Human papillomavirus; identical to SEQ ID NO: 55

SEQ ID NO: 2518 - protein, 368 aa, Human papillomavirus; identical to SEQ ID NO: 62

SEQ ID NO: 2519 - protein, 368 aa, Human papillomavirus; identical to SEQ ID NO: 68

SEQ ID NO: 2520 - protein, 367 aa, Human papillomavirus
METLSQRLNACQNKILDCFEKDSRCIADHIEYWKAVRHENVLYYKARENDITVLNHQMVPCLQVCKAKACSAIEVQIALESLSTTIYNNEEWTLRDTCEELWLTEPKKCFKKEGQHIEVWFDGSKNNCMQYVAWKYIYYNGDCGWQKVCSGVDYRGIYYVHDGHKTYYTDFEQEAKKFGCKNIWEVHMENESIYCPDSVSSTCRYNVSPVETVNEYNTHKTTTTTSTSVGNQDAAVSHRPGKRPRLRESEFDSSRESHAKCVTTHTHISDTDNTDSRSRSINNNNHPGDKTTPVVHLKGEPNRLKCCRYRFQKYKTLFVDVTSTYHWTSTDNKNYSIITIIYKDETQRNSFLSHVKIPVVYRLVWDK

SEQ ID NO: 2521 - protein, 358 aa, Human papillomavirus; identical to SEQ ID NO: 79

SEQ ID NO: 2522 - protein, 158 aa, Human papillomavirus; identical to SEQ ID NO: 36

SEQ ID NO: 2523 - protein, 158 aa, Human papillomavirus; identical to SEQ ID NO: 43

SEQ ID NO: 2524 - protein, 149 aa, Human papillomavirus; identical to SEQ ID NO: 50

SEQ ID NO: 2525 - protein, 149 aa, Human papillomavirus; identical to SEQ ID NO: 57

SEQ ID NO: 2526 - protein, 158 aa, Human papillomavirus
MARFDDPKQRPYKLPDLCTELNTSLQDVSIACVYCKATLERTEVYQFAFKDLCIVYRDCIAYAACHKCIDFYSRIRELRYYSNSVYGETLEKITNTELYNLLIRCLRCQKPLNPAEKRRHLKDKRRFHSIAGQYRGQCNTCCDQARQERLRRRRETQV

SEQ ID NO: 2527 - protein, 148 aa, Human papillomavirus; identical to SEQ ID NO: 69

SEQ ID NO: 2528 - protein, 155 aa, Human papillomavirus; identical to SEQ ID NO: 74

SEQ ID NO: 2529 - protein, 149 aa, Human papillomavirus; identical to SEQ ID NO: 80

SEQ ID NO: 2530 - protein, 98 aa, Human papillomavirus; identical to SEQ ID NO: 37

SEQ ID NO: 2531 - protein, 105 aa, Human papillomavirus
MHGPKATLQDIVLHLEPQNEIPVDLLCHEQLSDSEEENDEIDGVNHQHLPARRAEPQRHTMLCMCCKCEARIELVVESSADDLRAFQQLFLNTLSFVCPWCASQQ

SEQ ID NO: 2532 - protein, 98 aa, Human papillomavirus; identical to SEQ ID NO: 51

SEQ ID NO: 2533 - protein, 97 aa, Human papillomavirus; identical to SEQ ID NO: 58

SEQ ID NO: 2534 - protein, 106 aa, Human papillomavirus
MHGPRETLQEIVLHLEPQNELDPVDLLCYEQLSESEEENDEADGVSHAQLPARRAEPQRHKILCVCCKCDGRIELTVESSAEDLRTLQQLFLSTLSFVCPWCATNQ

SEQ ID NO: 2535 - protein, 99 aa, Human papillomavirus; identical to SEQ ID NO: 70

SEQ ID NO: 2536 - protein, 105 aa, Human papillomavirus; identical to SEQ ID NO: 75

SEQ ID NO: 2537 - protein, 98 aa, Human papillomavirus; identical to SEQ ID NO: 81

SEQ ID NO: 2538 - protein, 9 aa, Human papillomavirus
KLPQLCTEV

SEQ ID NO: 2539 - protein, 10 aa, Human papillomavirus
TIHDIILECV

SEQ ID NO: 2540 - protein, 10 aa, Human papillomavirus
TLHDIILECV

SEQ ID NO: 2541 - protein, 9 aa, Human papillomavirus
FAFRDLCIV

SEQ ID NO: 2542 - protein, 9 aa, Human papillomavirus
FLFRDLCIV

SEQ ID NO: 2543 - protein, 10 aa, Human papillomavirus
YMLDLQPETT

SEQ ID NO: 2544 - protein, 10 aa, Human papillomavirus
YMLDLQPETV

SEQ ID NO: 2545 - protein, 9 aa, Human papillomavirus
TLHEYMLDV

SEQ ID NO: 2546 - protein, 9 aa, Human papillomavirus
LLMGTLGIV

SEQ ID NO: 2547 - protein, 8 aa, Human papillomavirus
TLGIVCPI

SEQ ID NO: 2548 - protein, 8 aa, Human papillomavirus
TLGIVCPV

SEQ ID NO: 2549 - protein, 10 aa, Human papillomavirus
SLQDIEITCV

SEQ ID NO: 2550 - protein, 9 aa, Human papillomavirus
KTVLELTEV

SEQ ID NO: 2551 - protein, 9 aa, Human papillomavirus
KLVLELTEV

SEQ ID NO: 2552 - protein, 9 aa, Human papillomavirus
FAFKDLFVV

SEQ ID NO: 2553 - protein, 10 aa, Human papillomavirus
SVYGDTLEKV

SEQ ID NO: 2554 - protein, 10 aa, Human papillomavirus
KLTNTGLYNV

SEQ ID NO: 2555 - protein, 10 aa, Human papillomavirus
GLYNLLIRCV

SEQ ID NO: 2556 - protein, 9 aa, Human papillomavirus
TLQDIVLHL

SEQ ID NO: 2557 - protein, 9 aa, Human papillomavirus
FLQLFLNTL

SEQ ID NO: 2558 - protein, 10 aa, Human papillomavirus
QLFLNTLSFV

SEQ ID NO: 2559 - protein, 9 aa, Human papillomavirus
KLPDLCTEL

SEQ ID NO: 2560 - protein, 9 aa, Human papillomavirus
KLPDLCTEV

SEQ ID NO: 2561 - protein, 10 aa, Human papillomavirus
TLSFVCPWCV

SEQ ID NO: 2562 - protein, 9 aa, Human papillomavirus
KLHELSSAL

SEQ ID NO: 2563 - protein, 9 aa, Human papillomavirus
FAFTDLTIV

SEQ ID NO: 2564 - protein, 10 aa, Human papillomavirus
KLTNKGICDL

SEQ ID NO: 2565 - protein, 9 aa, Human papillomavirus
ALETTIHNV

SEQ ID NO: 2566 - protein, 10 aa, Human papillomavirus
TLHNIELQCV

SEQ ID NO: 2567 - protein, 10 aa, Human papillomavirus
GICKLCLRFV

SEQ ID NO: 2568 - protein, 10 aa, Human papillomavirus
SVYGNTLEQV

SEQ ID NO: 2569 - protein, 10 aa, Human papillomavirus
YVLDLYPEPV

SEQ ID NO: 2570 - protein, 10 aa, Human papillomavirus
QLLMGTVNIV

SEQ ID NO: 2571 - protein, 9 aa, Human papillomavirus
LLMGTVNIV

SEQ ID NO: 2572 - protein, 10 aa, Human papillomavirus
SLQDVSIACV

SEQ ID NO: 2573 - protein, 9 aa, Human papillomavirus
LLDVSIACV

SEQ ID NO: 2574 - protein, 9 aa, Human papillomavirus
FLFKDLCIV

SEQ ID NO: 2575 - protein, 10 aa, Human papillomavirus
ILYRDCIAYA

SEQ ID NO: 2576 - protein, 10 aa, Human papillomavirus
IVYRDCIAYV

SEQ ID NO: 2577 - protein, 9 aa, Human papillomavirus
RLLHELCEV

SEQ ID NO: 2578 - protein, 9 aa, Human papillomavirus
VLEESVHEI

SEQ ID NO: 2579 - protein, 9 aa, Human papillomavirus
FLFTDLRIV

SEQ ID NO: 2580 - protein, 9 aa, Human papillomavirus
TLQQMLLGV

SEQ ID NO: 2581 - protein, 10 aa, Human papillomavirus
QMLLGTLQVV

SEQ ID NO: 2582 - protein, 9 aa, Human papillomavirus
MLLGTLQVV

SEQ ID NO: 2583 - protein, 10 aa, Human papillomavirus
HLSEVLEIPV

SEQ ID NO: 2584 - protein, 10 aa, Human papillomavirus
PLIDLRLSCV

SEQ ID NO: 2585 - protein, 9 aa, Human papillomavirus
FLCTELKLV

SEQ ID NO: 2586 - protein, 10 aa, Human papillomavirus
KLHTCYLIHV

SEQ ID NO: 2587 - protein, 10 aa, Human papillomavirus
RVVQQLLMGV

SEQ ID NO: 2588 - protein, 9 aa, Human papillomavirus
LLMGALTVT

SEQ ID NO: 2589 - protein, 9 aa, Human papillomavirus
LLMGALTVV

SEQ ID NO: 2590 - protein, 9 aa, Human papillomavirus
GLLTVTCPL

SEQ ID NO: 2591 - protein, 9 aa, Human papillomavirus
FVFADLRIV

SEQ ID NO: 2592 - protein, 10 aa, Human papillomavirus
SLYGDTLEQT

SEQ ID NO: 2593 - protein, 9 aa, Human papillomavirus
YLCGTTVRL

SEQ ID NO: 2594 - protein, 10 aa, Human papillomavirus
QLLMGTCTIV

SEQ ID NO: 2595 - protein, 11 aa, Human papillomavirus
RTAMFQDPQER

SEQ ID NO: 2596 - protein, 10 aa, Human papillomavirus
AFRDLCIVYK

SEQ ID NO: 2597 - protein, 10 aa, Human papillomavirus
AVCDKCLKFR

SEQ ID NO: 2598 - protein, 10 aa, Human papillomavirus
KLYSKISEYR

SEQ ID NO: 2599 - protein, 10 aa, Human papillomavirus
LLIRCINCQK

SEQ ID NO: 2600 - protein, 10 aa, Human papillomavirus
MSCCRSSRTK

SEQ ID NO: 2601 - protein, 9 aa, Human papillomavirus
SVCRSSRTR

SEQ ID NO: 2602 - protein, 11 aa, Human papillomavirus
RFEDPTRRPYK

SEQ ID NO: 2603 - protein, 10 aa, Human papillomavirus
AVKDLFVVYR

SEQ ID NO: 2604 - protein, 10 aa, Human papillomavirus
FVVYRDSIPK

SEQ ID NO: 2605 - protein, 9 aa, Human papillomavirus
SIPHAACHK

SEQ ID NO: 2606 - protein, 9 aa, Human papillomavirus
SIPHAACHR

SEQ ID NO: 2607 - protein, 10 aa, Human papillomavirus
DSVYGDTLER

SEQ ID NO: 2608 - protein, 10 aa, Human papillomavirus
LLIRCLRCQK

SEQ ID NO: 2609 - protein, 10 aa, Human papillomavirus
LSIRCLRCQK

SEQ ID NO: 2610 - protein, 10 aa, Human papillomavirus
RFHNIAGHYK

SEQ ID NO: 2611 - protein, 10 aa, Human papillomavirus
RTQCHSCCNR

SEQ ID NO: 2612 - protein, 9 aa, Human papillomavirus
ATLQDIVLH

SEQ ID NO: 2613 - protein, 9 aa, Human papillomavirus
ATLQDIVLK

SEQ ID NO: 2614 - protein, 9 aa, Human papillomavirus
GVNHQHLPK

SEQ ID NO: 2615 - protein, 9 aa, Human papillomavirus
HTMLCMCCR

SEQ ID NO: 2616 - protein, 9 aa, Human papillomavirus
LSFVCPWCR

SEQ ID NO: 2617 - protein, 10 aa, Human papillomavirus
ATTDLTIVYR

SEQ ID NO: 2618 - protein, 10 aa, Human papillomavirus
RLYSKVSEFR

SEQ ID NO: 2619 - protein, 10 aa, Human papillomavirus
KVSEFRWYRY

SEQ ID NO: 2620 - protein, 9 aa, Human papillomavirus
KVSEFRWYR

SEQ ID NO: 2621 - protein, 10 aa, Human papillomavirus
KVSEFRWYRR

SEQ ID NO: 2622 - protein, 9 aa, Human papillomavirus
SVYGTTLEK

SEQ ID NO: 2623 - protein, 9 aa, Human papillomavirus
SVYGTTLER

SEQ ID NO: 2624 - protein, 9 aa, Human papillomavirus
TTLEKLTNK

SEQ ID NO: 2625 - protein, 10 aa, Human papillomavirus
LLIRCITCQK

SEQ ID NO: 2626 - protein, 10 aa, Human papillomavirus
LVIRCITCQR

SEQ ID NO: 2627 - protein, 10 aa, Human papillomavirus
WTGRCIACWK

SEQ ID NO: 2628 - protein, 10 aa, Human papillomavirus
RTIACWRRPR

SEQ ID NO: 2629 - protein, 10 aa, Human papillomavirus
NVVTFCCQCK

SEQ ID NO: 2630 - protein, 10 aa, Human papillomavirus
AVADLTVVYR

SEQ ID NO: 2631 - protein, 10 aa, Human papillomavirus
RVLSKISEYR

SEQ ID NO: 2632 - protein, 10 aa, Human papillomavirus
KISEYRHYNR

SEQ ID NO: 2633 - protein, 10 aa, Human papillomavirus
ITIRCIICQR

SEQ ID NO: 2634 - protein, 9 aa, Human papillomavirus
AQPATADYY

SEQ ID NO: 2635 - protein, 9 aa, Human papillomavirus
VSIACVYCK

SEQ ID NO: 2636 - protein, 9 aa, Human papillomavirus
VSIACVYCR

SEQ ID NO: 2637 - protein, 10 aa, Human papillomavirus
RTEVYQFAFR

SEQ ID NO: 2638 - protein, 10 aa, Human papillomavirus
AVKDLCIVYR

SEQ ID NO: 2639 - protein, 9 aa, Human papillomavirus
IVYRDCIAY

SEQ ID NO: 2640 - protein, 9 aa, Human papillomavirus
IVYRDCIAR

SEQ ID NO: 2641 - protein, 10 aa, Human papillomavirus
AACHKCIDFK

SEQ ID NO: 2642 - protein, 9 aa, Human papillomavirus
SVYGETLER

SEQ ID NO: 2643 - protein, 9 aa, Human papillomavirus
VVHAQLPAR

SEQ ID NO: 2644 - protein, 9 aa, Human papillomavirus
RTQCVQCKK

SEQ ID NO: 2645 - protein, 11 aa, Human papillomavirus
FLFTDLRIVYR

SEQ ID NO: 2646 - protein, 10 aa, Human papillomavirus
LFTDLRIVYK

SEQ ID NO: 2647 - protein, 9 aa, Human papillomavirus
IVYRDNNPY

SEQ ID NO: 2648 - protein, 10 aa, Human papillomavirus
CIMCLRFLSR

SEQ ID NO: 2649 - protein, 10 aa, Human papillomavirus
SLYGKTLEEK

SEQ ID NO: 2650 - protein, 9 aa, Human papillomavirus
KTLEERVKK

SEQ ID NO: 2651 - protein, 9 aa, Human papillomavirus
NIMGRWTGK

SEQ ID NO: 2652 - protein, 9 aa, Human papillomavirus
LVYRDDFPK

SEQ ID NO: 2653 - protein, 10 aa, Human papillomavirus
AVCRVCLLFR

SEQ ID NO: 2654 - protein, 9 aa, Human papillomavirus
RFCLLFYSK

SEQ ID NO: 2655 - protein, 10 aa, Human papillomavirus
CFLFYSKVRK

SEQ ID NO: 2656 - protein, 9 aa, Human papillomavirus
LLFYSKVRK

SEQ ID NO: 2657 - protein, 11 aa, Human papillomavirus
LLFYSKVRKYR

SEQ ID NO: 2658 - protein, 10 aa, Human papillomavirus
LVYSKVRKYR

SEQ ID NO: 2659 - protein, 9 aa, Human papillomavirus
ATLESITKK

SEQ ID NO: 2660 - protein, 9 aa, Human papillomavirus
KQLCDLLIR

SEQ ID NO: 2661 - protein, 9 aa, Human papillomavirus
KVLCDLLIR

SEQ ID NO: 2662 - protein, 9 aa, Human papillomavirus
KQHTCYLIR

SEQ ID NO: 2663 - protein, 9 aa, Human papillomavirus
VQLDIQSTK

SEQ ID NO: 2664 - protein, 9 aa, Human papillomavirus
VTLDIQSTK

SEQ ID NO: 2665 - protein, 9 aa, Human papillomavirus
TSVHEIELK

SEQ ID NO: 2666 - protein, 9 aa, Human papillomavirus
YTFVFADLR

SEQ ID NO: 2667 - protein, 10 aa, Human papillomavirus
VVADLRIVYR

SEQ ID NO: 2668 - protein, 10 aa, Human papillomavirus
VVADLRIVYR

SEQ ID NO: 2669 - protein, 9 aa, Human papillomavirus
FADLRIVYR

SEQ ID NO: 2670 - protein, 10 aa, Human papillomavirus
RTLSKISEYR

SEQ ID NO: 2671 - protein, 9 aa, Human papillomavirus
LVRCIICQR

SEQ ID NO: 2672 - protein, 9 aa, Human papillomavirus
RVAVCWRPR

SEQ ID NO: 2673 - protein, 9 aa, Human papillomavirus
AVCWRPRRR

SEQ ID NO: 2674 - protein, 10 aa, Human papillomavirus
ITDIILECVY

SEQ ID NO: 2675 - protein, 10 aa, Human papillomavirus
YSKISEYRHY

SEQ ID NO: 2676 - protein, 9 aa, Human papillomavirus
ISEYRHYCY

SEQ ID NO: 2677 - protein, 9 aa, Human papillomavirus
ISDYRHYCY

SEQ ID NO: 2678 - protein, 10 aa, Human papillomavirus
EYRHYCYSLY

SEQ ID NO: 2679 - protein, 10 aa, Human papillomavirus
ETRHYCYSLY

SEQ ID NO: 2680 - protein, 10 aa, Human papillomavirus
HTDTPTLHEY

SEQ ID NO: 2681 - protein, 10 aa, Human papillomavirus
LTDIEITCVY

SEQ ID NO: 2682 - protein, 10 aa, Human papillomavirus
YSDIRELRHY

SEQ ID NO: 2683 - protein, 11 aa, Human papillomavirus
TLEKLTNTGLY

SEQ ID NO: 2684 - protein, 9 aa, Human papillomavirus
LSSALEIPY

SEQ ID NO: 2685 - protein, 9 aa, Human papillomavirus
LTSALEIPY

SEQ ID NO: 2686 - protein, 8 aa, Human papillomavirus
FTDLTIVY

SEQ ID NO: 2687 - protein, 10 aa, Human papillomavirus
YTKVSEFRWY

SEQ ID NO: 2688 - protein, 10 aa, Human papillomavirus
YSDVSEFRWY

SEQ ID NO: 2689 - protein, 9 aa, Human papillomavirus
VSEFRWYRY

SEQ ID NO: 2690 - protein, 9 aa, Human papillomavirus
VTEFRWYRY

SEQ ID NO: 2691 - protein, 9 aa, Human papillomavirus
VSDFRWYRY

SEQ ID NO: 2692 - protein, 10 aa, Human papillomavirus
RTETPTLQDY

SEQ ID NO: 2693 - protein, 9 aa, Human papillomavirus
QAEPDTSNY

SEQ ID NO: 2694 - protein, 9 aa, Human papillomavirus
QTEPDTSNY

SEQ ID NO: 2695 - protein, 11 aa, Human papillomavirus
PTLKEYVLDLY

SEQ ID NO: 2696 - protein, 9 aa, Human papillomavirus
LTEYVLDLY

SEQ ID NO: 2697 - protein, 9 aa, Human papillomavirus
ISEYRHYNY

SEQ ID NO: 2698 - protein, 9 aa, Human papillomavirus
ISDYRHYNY

SEQ ID NO: 2699 - protein, 10 aa, Human papillomavirus
LQDVSIACVY

SEQ ID NO: 2700 - protein, 10 aa, Human papillomavirus
LTDVSIACVY

SEQ ID NO: 2701 - protein, 9 aa, Human papillomavirus
ATLERTEVY

SEQ ID NO: 2702 - protein, 10 aa, Human papillomavirus
FTSRIRELRY

SEQ ID NO: 2703 - protein, 9 aa, Human papillomavirus
YSRIRELRY

SEQ ID NO: 2704 - protein, 10 aa, Human papillomavirus
YSDIRELRYY

SEQ ID NO: 2705 - protein, 10 aa, Human papillomavirus
ELDPVDLLCY

SEQ ID NO: 2706 - protein, 10 aa, Human papillomavirus
ETDPVDLLCY

SEQ ID NO: 2707 - protein, 9 aa, Human papillomavirus
ISDYRHPQY

SEQ ID NO: 2708 - protein, 9 aa, Human papillomavirus
QAEQATSNY

SEQ ID NO: 2709 - protein, 10 aa, Human papillomavirus
QTEQATSNNY

SEQ ID NO: 2710 - protein, 10 aa, Human papillomavirus
QTEQATSNYY

SEQ ID NO: 2711 - protein, 10 aa, Human papillomavirus
ATDNYYIVTY

SEQ ID NO: 2712 - protein, 9 aa, Human papillomavirus
TSDYYIVTY

SEQ ID NO: 2713 - protein, 10 aa, Human papillomavirus
FTSKVRKYRY

SEQ ID NO: 2714 - protein, 9 aa, Human papillomavirus
LTDLLIRCY

SEQ ID NO: 2715 - protein, 9 aa, Human papillomavirus
KTDQRSEVY

SEQ ID NO: 2716 - protein, 10 aa, Human papillomavirus
ETRHYNYSLY

SEQ ID NO: 2717 - protein, 10 aa, Human papillomavirus
ATRDLCIVYR

SEQ ID NO: 2718 - protein, 10 aa, Human papillomavirus
AFRDLCIVYK

SEQ ID NO: 2719 - protein, 9 aa, Human papillomavirus
IVYRDGNPY

SEQ ID NO: 2720 - protein, 10 aa, Human papillomavirus
AVCDKCLKFY

SEQ ID NO: 2721 - protein, 10 aa, Human papillomavirus
ATCDKCLKFY

SEQ ID NO: 2722 - protein, 10 aa, Human papillomavirus
AVCDKCLKFR

SEQ ID NO: 2723 - protein, 10 aa, Human papillomavirus
KFYSKISEYK

SEQ ID NO: 2724 - protein, 10 aa, Human papillomavirus
KLYSKISEYR

SEQ ID NO: 2725 - protein, 10 aa, Human papillomavirus
KISEYRHYCY

SEQ ID NO: 2726 - protein, 10 aa, Human papillomavirus
KISEYRHYCR

SEQ ID NO: 2727 - protein, 10 aa, Human papillomavirus
GLVCPICSQK

SEQ ID NO: 2728 - protein, 10 aa, Human papillomavirus
LLIRCINCQK

SEQ ID NO: 2729 - protein, 10 aa, Human papillomavirus
KVRFHNIRGR

SEQ ID NO: 2730 - protein, 10 aa, Human papillomavirus
KQRFHNIRGK

SEQ ID NO: 2731 - protein, 10 aa, Human papillomavirus
MSCCRSSRTK

SEQ ID NO: 2732 - protein, 9 aa, Human papillomavirus
KLCLRFLSK

SEQ ID NO: 2733 - protein, 10 aa, Human papillomavirus
RVLSKISEYR

SEQ ID NO: 2734 - protein, 10 aa, Human papillomavirus
KISEYRHYNR

SEQ ID NO: 2735 - protein, 9 aa, Human papillomavirus
ATLQDIVLH

SEQ ID NO: 2736 - protein, 9 aa, Human papillomavirus
ATLQDIVLK

SEQ ID NO: 2737 - protein, 9 aa, Human papillomavirus
RLQCVQCKK

SEQ ID NO: 2738 - protein, 9 aa, Human papillomavirus
IVYRDNNPY

SEQ ID NO: 2739 - protein, 10 aa, Human papillomavirus
CIMCLRFLSR

SEQ ID NO: 2740 - protein, 9 aa, Human papillomavirus
IMCLRFLSK

SEQ ID NO: 2741 - protein, 10 aa, Human papillomavirus
KISEYRHYQY

SEQ ID NO: 2742 - protein, 10 aa, Human papillomavirus
SLYGKTLEER

SEQ ID NO: 2743 - protein, 10 aa, Human papillomavirus
SLYGKTLEEK

SEQ ID NO: 2744 - protein, 9 aa, Human papillomavirus
KTLEERVKK

SEQ ID NO: 2745 - protein, 9 aa, Human papillomavirus
KVCLRLLSK

SEQ ID NO: 2746 - protein, 10 aa, Human papillomavirus
RLLSKISEYR

SEQ ID NO: 2747 - protein, 10 aa, Human papillomavirus
RTLSKISEYR

SEQ ID NO: 2748 - protein, 10 aa, Human papillomavirus
RLLSKISEYK

SEQ ID NO: 2749 - protein, 10 aa, Human papillomavirus
KISEYRHYNK

SEQ ID NO: 2750 - protein, 9 aa, Human papillomavirus
AVCWRPRRR

SEQ ID NO: 2751 - protein, 9 aa, Human papillomavirus
AFCWRPRRR

SEQ ID NO: 2752 - protein, 9 aa, Human papillomavirus
AVCWRPRRK

SEQ ID NO: 2753 - protein, 9 aa, Human papillomavirus
PYAVCDKCF

SEQ ID NO: 2754 - protein, 9 aa, Human papillomavirus
KFYSKISEF

SEQ ID NO: 2755 - protein, 9 aa, Human papillomavirus
CYSLYGTTL

SEQ ID NO: 2756 - protein, 9 aa, Human papillomavirus
RFHNIRGRW

SEQ ID NO: 2757 - protein, 9 aa, Human papillomavirus
RFHNIRGRF

SEQ ID NO: 2758 - protein, 10 aa, Human papillomavirus
QYNKPLCDLL

SEQ ID NO: 2759 - protein, 10 aa, Human papillomavirus
QYNKPLCDLF

SEQ ID NO: 2760 - protein, 11 aa, Human papillomavirus
QYNKPLCDLLI

SEQ ID NO: 2761 - protein, 10 aa, Human papillomavirus
TFCCKCDSTF

SEQ ID NO: 2762 - protein, 9 aa, Human papillomavirus
RFHNIAGHF

SEQ ID NO: 2763 - protein, 9 aa, Human papillomavirus
VYCKTVLEL

SEQ ID NO: 2764 - protein, 9 aa, Human papillomavirus
VYCKTVLEF

SEQ ID NO: 2765 - protein, 10 aa, Human papillomavirus
VFEFAFKDLF

SEQ ID NO: 2766 - protein, 9 aa, Human papillomavirus
LFVVYRDSF

SEQ ID NO: 2767 - protein, 9 aa, Human papillomavirus
LYNLLIRCF

SEQ ID NO: 2768 - protein, 9 aa, Human papillomavirus
RFYSKVSEF

SEQ ID NO: 2769 - protein, 10 aa, Human papillomavirus
FYSKVSEFRW

SEQ ID NO: 2770 - protein, 10 aa, Human papillomavirus
FYSKVSEFRF

SEQ ID NO: 2771 - protein, 9 aa, Human papillomavirus
RYSVYGTTL

SEQ ID NO: 2772 - protein, 9 aa, Human papillomavirus
VYGTTLEKF

SEQ ID NO: 2773 - protein, 9 aa, Human papillomavirus
VYGTTLEKF

SEQ ID NO: 2774 - protein, 9 aa, Human papillomavirus
VYDFAFADL

SEQ ID NO: 2775 - protein, 10 aa, Human papillomavirus
VYREGNPFGI

SEQ ID NO: 2776 - protein, 10 aa, Human papillomavirus
VYREGNPFGF

SEQ ID NO: 2777 - protein, 11 aa, Human papillomavirus
PFGICKLCLRF

SEQ ID NO: 2778 - protein, 9 aa, Human papillomavirus
RFHNISGRW

SEQ ID NO: 2779 - protein, 9 aa, Human papillomavirus
RFHNISGRF

SEQ ID NO: 2780 - protein, 9 aa, Human papillomavirus
VYQFAFKDL

SEQ ID NO: 2781 - protein, 10 aa, Human papillomavirus
FYSRIRELRY

SEQ ID NO: 2782 - protein, 10 aa, Human papillomavirus
FYSRIRELRF

SEQ ID NO: 2783 - protein, 9 aa, Human papillomavirus
VYGETLEKI

SEQ ID NO: 2784 - protein, 9 aa, Human papillomavirus
VYGETLEKF

SEQ ID NO: 2785 - protein, 9 aa, Human papillomavirus
VYKFLFTDL

SEQ ID NO: 2786 - protein, 9 aa, Human papillomavirus
KFLFTDLRF

SEQ ID NO: 2787 - protein, 11 aa, Human papillomavirus
PYGVCIMCLRF

SEQ ID NO: 2788 - protein, 9 aa, Human papillomavirus
EYRHYQYSL

SEQ ID NO: 2789 - protein, 9 aa, Human papillomavirus
EYRHYQYSF

SEQ ID NO: 2790 - protein, 9 aa, Human papillomavirus
RFHNIMGRW

SEQ ID NO: 2791 - protein, 9 aa, Human papillomavirus
RFHNIMGRF

SEQ ID NO: 2792 - protein, 10 aa, Human papillomavirus
TYCHSCDSTL

SEQ ID NO: 2793 - protein, 10 aa, Human papillomavirus
TYCHSCDSTF

SEQ ID NO: 2794 - protein, 9 aa, Human papillomavirus
VYNFACTEL

SEQ ID NO: 2795 - protein, 9 aa, Human papillomavirus
NFACTELKF

SEQ ID NO: 2796 - protein, 10 aa, Human papillomavirus
PYAVCRVCLL

SEQ ID NO: 2797 - protein, 10 aa, Human papillomavirus
PYAVCRVCLF

SEQ ID NO: 2798 - protein, 9 aa, Human papillomavirus
VYGATLESI

SEQ ID NO: 2799 - protein, 9 aa, Human papillomavirus
RFHLIAHGW

SEQ ID NO: 2800 - protein, 9 aa, Human papillomavirus
VYDFVFADL

SEQ ID NO: 2801 - protein, 11 aa, Human papillomavirus
VYDFVFADLRI

SEQ ID NO: 2802 - protein, 9 aa, Human papillomavirus
VYADLRIVY

SEQ ID NO: 2803 - protein, 9 aa, Human papillomavirus
EYRHYNYSL

SEQ ID NO: 2804 - protein, 9 aa, Human papillomavirus
NYSLYGDTL

SEQ ID NO: 2805 - protein, 9 aa, Human papillomavirus
NYSLYGDTF

SEQ ID NO: 2806 - protein, 10 aa, Human papillomavirus
LYGDTLEQTL

SEQ ID NO: 2807 - protein, 10 aa, Human papillomavirus
LYGDTLEQTF

SEQ ID NO: 2808 - protein, 9 aa, Human papillomavirus
NYYIVTCCF

SEQ ID NO: 2809 - protein, 10 aa, Human papillomavirus
CYTCGTTVRL

SEQ ID NO: 2810 - protein, 10 aa, Human papillomavirus
CYTCGTTVRF

SEQ ID NO: 2811 - protein, 10 aa, Human papillomavirus
TIHDIILECV

SEQ ID NO: 2812 - protein, 10 aa, Human papillomavirus
TLHDIILECV

SEQ ID NO: 2813 - protein, 10 aa, Human papillomavirus
YMLDLQPETT

SEQ ID NO: 2814 - protein, 10 aa, Human papillomavirus
YMLDLQPETV

SEQ ID NO: 2815 - protein, 9 aa, Human papillomavirus
TLHEYMLDV

SEQ ID NO: 2816 - protein, 9 aa, Human papillomavirus
LLMGTLGIV

SEQ ID NO: 2817 - protein, 8 aa, Human papillomavirus
TLGIVCPI

SEQ ID NO: 2818 - protein, 8 aa, Human papillomavirus
TLGIVCPV

SEQ ID NO: 2819 - protein, 10 aa, Human papillomavirus
SLQDIEITCV

SEQ ID NO: 2820 - protein, 9 aa, Human papillomavirus
KLVLELTEV

SEQ ID NO: 2821 - protein, 9 aa, Human papillomavirus
FAFKDLFVV

SEQ ID NO: 2822 - protein, 10 aa, Human papillomavirus
SVYGDTLEKV

SEQ ID NO: 2823 - protein, 10 aa, Human papillomavirus
KLTNTGLYNV

SEQ ID NO: 2824 - protein, 10 aa, Human papillomavirus
GLYNLLIRCV

SEQ ID NO: 2825 - protein, 9 aa, Human papillomavirus
TLQDIVLHL

SEQ ID NO: 2826 - protein, 9 aa, Human papillomavirus
FLQLFLNTL

SEQ ID NO: 2827 - protein, 9 aa, Human papillomavirus
KLPDLCTEL

SEQ ID NO: 2828 - protein, 9 aa, Human papillomavirus
KLPDLCTEV

SEQ ID NO: 2829 - protein, 9 aa, Human papillomavirus
KLHELSSAL

SEQ ID NO: 2830 - protein, 9 aa, Human papillomavirus
FAFTDLTIV

SEQ ID NO: 2831 - protein, 10 aa, Human papillomavirus
KLTNKGICDL

SEQ ID NO: 2832 - protein, 9 aa, Human papillomavirus
ALETTIHNV

SEQ ID NO: 2833 - protein, 10 aa, Human papillomavirus
TLHNIELQCV

SEQ ID NO: 2834 - protein, 10 aa, Human papillomavirus
GICKLCLRFV

SEQ ID NO: 2835 - protein, 10 aa, Human papillomavirus
SVYGNTLEQV

SEQ ID NO: 2836 - protein, 10 aa, Human papillomavirus
YVLDLYPEPV

SEQ ID NO: 2837 - protein, 10 aa, Human papillomavirus
QLLMGTVNIV

SEQ ID NO: 2838 - protein, 9 aa, Human papillomavirus
LLMGTVNIV

SEQ ID NO: 2839 - protein, 10 aa, Human papillomavirus
SLQDVSIACV

SEQ ID NO: 2840 - protein, 9 aa, Human papillomavirus
LLDVSIACV

SEQ ID NO: 2841 - protein, 10 aa, Human papillomavirus
IVYRDCIAYV

SEQ ID NO: 2842 - protein, 9 aa, Human papillomavirus
RLLHELCEV

SEQ ID NO: 2843 - protein, 9 aa, Human papillomavirus
VLEESVHEI

SEQ ID NO: 2844 - protein, 9 aa, Human papillomavirus
FLFTDLRIV

SEQ ID NO: 2845 - protein, 9 aa, Human papillomavirus
TLQQMLLGV

SEQ ID NO: 2846 - protein, 10 aa, Human papillomavirus
QMLLGTLQVV

SEQ ID NO: 2847 - protein, 9 aa, Human papillomavirus
MLLGTLQVV

SEQ ID NO: 2848 - protein, 10 aa, Human papillomavirus
PLIDLRLSCV

SEQ ID NO: 2849 - protein, 10 aa, Human papillomavirus
RVVQQLLMGV

SEQ ID NO: 2850 - protein, 9 aa, Human papillomavirus
LLMGALTVT

SEQ ID NO: 2851 - protein, 9 aa, Human papillomavirus
LLMGALTVV

SEQ ID NO: 2852 - protein, 9 aa, Human papillomavirus
GLLTVTCPL

SEQ ID NO: 2853 - protein, 9 aa, Human papillomavirus
FVFADLRIV

SEQ ID NO: 2854 - protein, 10 aa, Human papillomavirus
SLYGDTLEQT

SEQ ID NO: 2855 - protein, 9 aa, Human papillomavirus
YLCGTTVRL

SEQ ID NO: 2856 - protein, 10 aa, Human papillomavirus
QLLMGTCTIV

SEQ ID NO: 2857 - protein, 11 aa, Human papillomavirus
RTAMFQDPQER

SEQ ID NO: 2858 - protein, 10 aa, Human papillomavirus
AFRDLCIVYK

SEQ ID NO: 2859 - protein, 10 aa, Human papillomavirus
AVCDKCLKFR

SEQ ID NO: 2860 - protein, 10 aa, Human papillomavirus
LLIRCINCQK

SEQ ID NO: 2861 - protein, 10 aa, Human papillomavirus
FVVYRDSIPK

SEQ ID NO: 2862 - protein, 10 aa, Human papillomavirus
DSVYGDTLER

SEQ ID NO: 2863 - protein, 10 aa, Human papillomavirus
LSIRCLRCQK

SEQ ID NO: 2864 - protein, 9 aa, Human papillomavirus
HTMLCMCCR

SEQ ID NO: 2865 - protein, 10 aa, Human papillomavirus
ATTDLTIVYR

SEQ ID NO: 2866 - protein, 10 aa, Human papillomavirus
KVSEFRWYRY

SEQ ID NO: 2867 - protein, 10 aa, Human papillomavirus
KVSEFRWYRR

SEQ ID NO: 2868 - protein, 9 aa, Human papillomavirus
SVYGTTLEK

SEQ ID NO: 2869 - protein, 9 aa, Human papillomavirus
SVYGTTLER

SEQ ID NO: 2870 - protein, 10 aa, Human papillomavirus
WTGRCIACWK

SEQ ID NO: 2871 - protein, 9 aa, Human papillomavirus
VSIACVYCK

SEQ ID NO: 2872 - protein, 10 aa, Human papillomavirus
RTEVYQFAFR

SEQ ID NO: 2873 - protein, 9 aa, Human papillomavirus
IVYRDCIAY

SEQ ID NO: 2874 - protein, 9 aa, Human papillomavirus
SVYGETLER

SEQ ID NO: 2875 - protein, 9 aa, Human papillomavirus
IVYRDNNPY

SEQ ID NO: 2876 - protein, 10 aa, Human papillomavirus
SLYGKTLEEK

SEQ ID NO: 2877 - protein, 9 aa, Human papillomavirus
LVYRDDFPK

SEQ ID NO: 2878 - protein, 10 aa, Human papillomavirus
AVCRVCLLFR

SEQ ID NO: 2879 - protein, 9 aa, Human papillomavirus
RFCLLFYSK

SEQ ID NO: 2880 - protein, 10 aa, Human papillomavirus
CFLFYSKVRK

SEQ ID NO: 2881 - protein, 9 aa, Human papillomavirus
LLFYSKVRK

SEQ ID NO: 2882 - protein, 11 aa, Human papillomavirus
LLFYSKVRKYR

SEQ ID NO: 2883 - protein, 9 aa, Human papillomavirus
ATLESITKK

SEQ ID NO: 2884 - protein, 9 aa, Human papillomavirus
TSVHEIELK

SEQ ID NO: 2885 - protein, 9 aa, Human papillomavirus
YTFVFADLR

SEQ ID NO: 2886 - protein, 10 aa, Human papillomavirus
TLHDIILECV

SEQ ID NO: 2887 - protein, 10 aa, Human papillomavirus
YMLDLQPETV

SEQ ID NO: 2888 - protein, 10 aa, Human papillomavirus
SLQDIEITCV

SEQ ID NO: 2889 - protein, 9 aa, Human papillomavirus
FAFKDLFVV

SEQ ID NO: 2890 - protein, 10 aa, Human papillomavirus
SVYGDTLEKV

SEQ ID NO: 2891 - protein, 10 aa, Human papillomavirus
KLTNKGICDL

SEQ ID NO: 2892 - protein, 10 aa, Human papillomavirus
GICKLCLRFV

SEQ ID NO: 2893 - protein, 10 aa, Human papillomavirus
YVLDLYPEPV

SEQ ID NO: 2894 - protein, 10 aa, Human papillomavirus
QLLMGTVNIV

SEQ ID NO: 2895 - protein, 9 aa, Human papillomavirus
KLPDLCTEL

SEQ ID NO: 2896 - protein, 10 aa, Human papillomavirus
SLQDVSIACV

SEQ ID NO: 2897 - protein, 10 aa, Human papillomavirus
PLIDLRLSCV

SEQ ID NO: 2898 - protein, 10 aa, Human papillomavirus
RVVQQLLMGV

SEQ ID NO: 2899 - protein, 9 aa, Human papillomavirus
GLLTVTCPL

SEQ ID NO: 2900 - protein, 9 aa, Human papillomavirus
IVYRDGNPY

SEQ ID NO: 2901 - protein, 10 aa, Human papillomavirus
AVCDKCLKFR

SEQ ID NO: 2902 - protein, 10 aa, Human papillomavirus
LLIRCINCQK

SEQ ID NO: 2903 - protein, 10 aa, Human papillomavirus
DSVYGDTLER

SEQ ID NO: 2904 - protein, 9 aa, Human papillomavirus
HTMLCMCCR

SEQ ID NO: 2905 - protein, 10 aa, Human papillomavirus
ATTDLTIVYR

SEQ ID NO: 2906 - protein, 10 aa, Human papillomavirus
KVSEFRWYRY

SEQ ID NO: 2907 - protein, 9 aa, Human papillomavirus
SVYGTTLER

SEQ ID NO: 2908 - protein, 10 aa, Human papillomavirus
RVLSKISEYR

SEQ ID NO: 2909 - protein, 10 aa, Human papillomavirus
KISEYRHYNR

SEQ ID NO: 2910 - protein, 9 aa, Human papillomavirus
KLCLRFLSK

SEQ ID NO: 2911 - protein, 9 aa, Human papillomavirus
VSIACVYCK

SEQ ID NO: 2912 - protein, 10 aa, Human papillomavirus
RTEVYQFAFR

SEQ ID NO: 2913 - protein, 9 aa, Human papillomavirus
SVYGETLER

SEQ ID NO: 2914 - protein, 9 aa, Human papillomavirus
LVYRDDFPK

SEQ ID NO: 2915 - protein, 9 aa, Human papillomavirus
LLFYSKVRK

SEQ ID NO: 2916 - protein, 9 aa, Human papillomavirus
ATLESITKK

SEQ ID NO: 2917 - protein, 10 aa, Human papillomavirus
ITDIILECVY

SEQ ID NO: 2918 - protein, 9 aa, Human papillomavirus
ISDYRHYCY

SEQ ID NO: 2919 - protein, 10 aa, Human papillomavirus
HTDTPTLHEY

SEQ ID NO: 2920 - protein, 10 aa, Human papillomavirus
LTDIEITCVY

SEQ ID NO: 2921 - protein, 10 aa, Human papillomavirus
YSDIRELRHY

SEQ ID NO: 2922 - protein, 11 aa, Human papillomavirus
TLEKLTNTGLY

SEQ ID NO: 2923 - protein, 9 aa, Human papillomavirus
LSSALEIPY

SEQ ID NO: 2924 - protein, 8 aa, Human papillomavirus
FTDLTIVY

SEQ ID NO: 2925 - protein, 9 aa, Human papillomavirus
QTEPDTSNY

SEQ ID NO: 2926 - protein, 11 aa, Human papillomavirus
PTLKEYVLDLY

SEQ ID NO: 2927 - protein, 9 aa, Human papillomavirus
ISDYRHYNY

SEQ ID NO: 2928 - protein, 10 aa, Human papillomavirus
LTDVSIACVY

SEQ ID NO: 2929 - protein, 9 aa, Human papillomavirus
ATLERTEVY

SEQ ID NO: 2930 - protein, 10 aa, Human papillomavirus
ELDPVDLLCY

SEQ ID NO: 2931 - protein, 10 aa, Human papillomavirus
FTSKVRKYRY

SEQ ID NO: 2932 - protein, 9 aa, Human papillomavirus
LTDLLIRCY

SEQ ID NO: 2933 - protein, 9 aa, Human papillomavirus
RFHNIRGRW

SEQ ID NO: 2934 - protein, 9 aa, Human papillomavirus
KFYSKISEF

SEQ ID NO: 2935 - protein, 10 aa, Human papillomavirus
TFCCKCDSTF

SEQ ID NO: 2936 - protein, 9 aa, Human papillomavirus
RFHNIAGHF

SEQ ID NO: 2937 - protein, 9 aa, Human papillomavirus
VYCKTVLEF

SEQ ID NO: 2938 - protein, 9 aa, Human papillomavirus
LYNLLIRCF

SEQ ID NO: 2939 - protein, 10 aa, Human papillomavirus
FYSKVSEFRW

SEQ ID NO: 2940 - protein, 9 aa, Human papillomavirus
RYSVYGTTL

SEQ ID NO: 2941 - protein, 9 aa, Human papillomavirus
VYGTTLEKF

SEQ ID NO: 2942 - protein, 9 aa, Human papillomavirus
VYDFAFADL

SEQ ID NO: 2943 - protein, 10 aa, Human papillomavirus
VYREGNPFGI

SEQ ID NO: 2944 - protein, 9 aa, Human papillomavirus
RFHNISGRF

SEQ ID NO: 2945 - protein, 9 aa, Human papillomavirus
VYQFAFKDL

SEQ ID NO: 2946 - protein, 10 aa, Human papillomavirus
FYSRIRELRF

SEQ ID NO: 2947 - protein, 9 aa, Human papillomavirus
VYNFACTEL

SEQ ID NO: 2948 - protein, 10 aa, Human papillomavirus
PYAVCRVCLF

SEQ ID NO: 2949 - protein, 9 aa, Human papillomavirus
VYGATLESI

SEQ ID NO: 2950 - protein, 10 aa, Human papillomavirus
TLHDIILECV

SEQ ID NO: 2951 - protein, 10 aa, Human papillomavirus
YMLDLQPETV

SEQ ID NO: 2952 - protein, 10 aa, Human papillomavirus
SLQDIEITCV

SEQ ID NO: 2953 - protein, 9 aa, Human papillomavirus
FAFKDLFVV

SEQ ID NO: 2954 - protein, 10 aa, Human papillomavirus
SVYGDTLEKV

SEQ ID NO: 2955 - protein, 10 aa, Human papillomavirus
YVLDLYPEPV

SEQ ID NO: 2956 - protein, 10 aa, Human papillomavirus
KLTNKGICDL

SEQ ID NO: 2957 - protein, 9 aa, Human papillomavirus
KLPDLCTEL

SEQ ID NO: 2958 - protein, 10 aa, Human papillomavirus
SLQDVSIACV

SEQ ID NO: 2959 - protein, 9 aa, Human papillomavirus
IVYRDGNPY

SEQ ID NO: 2960 - protein, 10 aa, Human papillomavirus
AVCDKCLKFR

SEQ ID NO: 2961 - protein, 10 aa, Human papillomavirus
LLIRCINCQK

SEQ ID NO: 2962 - protein, 10 aa, Human papillomavirus
DSVYGDTLER

SEQ ID NO: 2963 - protein, 9 aa, Human papillomavirus
HTMLCMCCR

SEQ ID NO: 2964 - protein, 10 aa, Human papillomavirus
ATTDLTIVYR

SEQ ID NO: 2965 - protein, 10 aa, Human papillomavirus
KVSEFRWYRY

SEQ ID NO: 2966 - protein, 9 aa, Human papillomavirus
SVYGTTLER

SEQ ID NO: 2967 - protein, 9 aa, Human papillomavirus
VSIACVYCK

SEQ ID NO: 2968 - protein, 10 aa, Human papillomavirus
RTEVYQFAFR

SEQ ID NO: 2969 - protein, 9 aa, Human papillomavirus
SVYGETLER

SEQ ID NO: 2970 - protein, 10 aa, Human papillomavirus
ITDIILECVY

SEQ ID NO: 2971 - protein, 9 aa, Human papillomavirus
ISDYRHYCY

SEQ ID NO: 2972 - protein, 10 aa, Human papillomavirus
HTDTPTLHEY

SEQ ID NO: 2973 - protein, 10 aa, Human papillomavirus
LTDIEITCVY

SEQ ID NO: 2974 - protein, 10 aa, Human papillomavirus
YSDIRELRHY

SEQ ID NO: 2975 - protein, 11 aa, Human papillomavirus
TLEKLTNTGLY

SEQ ID NO: 2976 - protein, 9 aa, Human papillomavirus
LSSALEIPY

SEQ ID NO: 2977 - protein, 8 aa, Human papillomavirus
FTDLTIVY

SEQ ID NO: 2978 - protein, 9 aa, Human papillomavirus
QTEPDTSNY

SEQ ID NO: 2979 - protein, 10 aa, Human papillomavirus
LTDVSIACVY

SEQ ID NO: 2980 - protein, 9 aa, Human papillomavirus
ATLERTEVY

SEQ ID NO: 2981 - protein, 10 aa, Human papillomavirus
ELDPVDLLCY

SEQ ID NO: 2982 - protein, 9 aa, Human papillomavirus
RFHNIRGRW

SEQ ID NO: 2983 - protein, 9 aa, Human papillomavirus
KFYSKISEF

SEQ ID NO: 2984 - protein, 10 aa, Human papillomavirus
TFCCKCDSTF

SEQ ID NO: 2985 - protein, 9 aa, Human papillomavirus
RFHNIAGHF

SEQ ID NO: 2986 - protein, 9 aa, Human papillomavirus
VYCKTVLEF

SEQ ID NO: 2987 - protein, 9 aa, Human papillomavirus
LYNLLIRCF

SEQ ID NO: 2988 - protein, 10 aa, Human papillomavirus
FYSKVSEFRW

SEQ ID NO: 2989 - protein, 9 aa, Human papillomavirus
RYSVYGTTL

SEQ ID NO: 2990 - protein, 9 aa, Human papillomavirus
VYGTTLEKF

SEQ ID NO: 2991 - protein, 9 aa, Human papillomavirus
VYQFAFKDL

SEQ ID NO: 2992 - protein, 10 aa, Human papillomavirus
FYSRIRELRF

SEQ ID NO: 2993 - protein, 10 aa, Human papillomavirus
TLHDIILECV

SEQ ID NO: 2994 - protein, 10 aa, Human papillomavirus
YMLDLQPETV

SEQ ID NO: 2995 - protein, 10 aa, Human papillomavirus
SLQDIEITCV

SEQ ID NO: 2996 - protein, 9 aa, Human papillomavirus
FAFKDLFVV

SEQ ID NO: 2997 - protein, 10 aa, Human papillomavirus
SVYGDTLEKV

SEQ ID NO: 2998 - protein, 10 aa, Human papillomavirus
KLTNKGICDL

SEQ ID NO: 2999 - protein, 10 aa, Human papillomavirus
GICKLCLRFV

SEQ ID NO: 3000 - protein, 10 aa, Human papillomavirus
YVLDLYPEPV

SEQ ID NO: 3001 - protein, 10 aa, Human papillomavirus
QLLMGTVNIV

SEQ ID NO: 3002 - protein, 9 aa, Human papillomavirus
KLPDLCTEL

SEQ ID NO: 3003 - protein, 10 aa, Human papillomavirus
SLQDVSIACV

SEQ ID NO: 3004 - protein, 10 aa, Human papillomavirus
PLIDLRLSCV

SEQ ID NO: 3005 - protein, 10 aa, Human papillomavirus
RVVQQLLMGV

SEQ ID NO: 3006 - protein, 9 aa, Human papillomavirus
GLLTVTCPL

SEQ ID NO: 3007 - protein, 10 aa, Human papillomavirus
KLYSKISEYR

SEQ ID NO: 3008 - protein, 10 aa, Human papillomavirus
AVCDKCLKFR

SEQ ID NO: 3009 - protein, 10 aa, Human papillomavirus
LLIRCINCQK

SEQ ID NO: 3010 - protein, 10 aa, Human papillomavirus
DSVYGDTLER

SEQ ID NO: 3011 - protein, 9 aa, Human papillomavirus
HTMLCMCCR

SEQ ID NO: 3012 - protein, 10 aa, Human papillomavirus
ATTDLTIVYR

SEQ ID NO: 3013 - protein, 10 aa, Human papillomavirus
KVSEFRWYRY

SEQ ID NO: 3014 - protein, 9 aa, Human papillomavirus
SVYGTTLER

SEQ ID NO: 3015 - protein, 10 aa, Human papillomavirus
RVLSKISEYR

SEQ ID NO: 3016 - protein, 10 aa, Human papillomavirus
KISEYRHYNR

SEQ ID NO: 3017 - protein, 9 aa, Human papillomavirus
KLCLRFLSK

SEQ ID NO: 3018 - protein, 9 aa, Human papillomavirus
VSIACVYCK

SEQ ID NO: 3019 - protein, 10 aa, Human papillomavirus
RTEVYQFAFR

SEQ ID NO: 3020 - protein, 9 aa, Human papillomavirus
SVYGETLER

SEQ ID NO: 3021 - protein, 9 aa, Human papillomavirus
LVYRDDFPK

SEQ ID NO: 3022 - protein, 9 aa, Human papillomavirus
LLFYSKVRK

SEQ ID NO: 3023 - protein, 9 aa, Human papillomavirus
ATLESITKK

SEQ ID NO: 3024 - protein, 10 aa, Human papillomavirus
YSKISEYRHY

SEQ ID NO: 3025 - protein, 9 aa, Human papillomavirus
ISDYRHYCY

SEQ ID NO: 3026 - protein, 10 aa, Human papillomavirus
HTDTPTLHEY

SEQ ID NO: 3027 - protein, 10 aa, Human papillomavirus
LTDIEITCVY

SEQ ID NO: 3028 - protein, 10 aa, Human papillomavirus
YSDIRELRHY

SEQ ID NO: 3029 - protein, 11 aa, Human papillomavirus
TLEKLTNTGLY

SEQ ID NO: 3030 - protein, 9 aa, Human papillomavirus
LSSALEIPY

SEQ ID NO: 3031 - protein, 9 aa, Human papillomavirus
VSDFRWYRY

SEQ ID NO: 3032 - protein, 9 aa, Human papillomavirus
QTEPDTSNY

SEQ ID NO: 3033 - protein, 11 aa, Human papillomavirus
PTLKEYVLDLY

SEQ ID NO: 3034 - protein, 9 aa, Human papillomavirus
ISDYRHYNY

SEQ ID NO: 3035 - protein, 10 aa, Human papillomavirus
LTDVSIACVY

SEQ ID NO: 3036 - protein, 9 aa, Human papillomavirus
ATLERTEVY

SEQ ID NO: 3037 - protein, 10 aa, Human papillomavirus
ELDPVDLLCY

SEQ ID NO: 3038 - protein, 10 aa, Human papillomavirus
FTSKVRKYRY

SEQ ID NO: 3039 - protein, 9 aa, Human papillomavirus
LTDLLIRCY

SEQ ID NO: 3040 - protein, 9 aa, Human papillomavirus
RFHNIRGRW

SEQ ID NO: 3041 - protein, 9 aa, Human papillomavirus
KFYSKISEF

SEQ ID NO: 3042 - protein, 10 aa, Human papillomavirus
TFCCKCDSTF

SEQ ID NO: 3043 - protein, 9 aa, Human papillomavirus
RFHNIAGHF

SEQ ID NO: 3044 - protein, 9 aa, Human papillomavirus
VYCKTVLEF

SEQ ID NO: 3045 - protein, 9 aa, Human papillomavirus
LYNLLIRCF

SEQ ID NO: 3046 - protein, 10 aa, Human papillomavirus
FYSKVSEFRW

SEQ ID NO: 3047 - protein, 9 aa, Human papillomavirus
RYSVYGTTL

SEQ ID NO: 3048 - protein, 9 aa, Human papillomavirus
VYGTTLEKF

SEQ ID NO: 3049 - protein, 9 aa, Human papillomavirus
VYDFAFADL

SEQ ID NO: 3050 - protein, 10 aa, Human papillomavirus
VYREGNPFGI

SEQ ID NO: 3051 - protein, 9 aa, Human papillomavirus
RFHNISGRF

SEQ ID NO: 3052 - protein, 9 aa, Human papillomavirus
VYQFAFKDL

SEQ ID NO: 3053 - protein, 10 aa, Human papillomavirus
FYSRIRELRF

SEQ ID NO: 3054 - protein, 9 aa, Human papillomavirus
VYNFACTEL

SEQ ID NO: 3055 - protein, 10 aa, Human papillomavirus
PYAVCRVCLF

SEQ ID NO: 3056 - protein, 9 aa, Human papillomavirus
VYGATLESI

SEQ ID NO: 3057 - protein, 10 aa, Human papillomavirus
TLHDIILECV

SEQ ID NO: 3058 - protein, 10 aa, Human papillomavirus
YMLDLQPETV

SEQ ID NO: 3059 - protein, 10 aa, Human papillomavirus
SLQDIEITCV

SEQ ID NO: 3060 - protein, 9 aa, Human papillomavirus
FAFKDLFVV

SEQ ID NO: 3061 - protein, 10 aa, Human papillomavirus
SVYGDTLEKV

SEQ ID NO: 3062 - protein, 10 aa, Human papillomavirus
YVLDLYPEPV

SEQ ID NO: 3063 - protein, 10 aa, Human papillomavirus
KLTNKGICDL

SEQ ID NO: 3064 - protein, 9 aa, Human papillomavirus
KLPDLCTEL

SEQ ID NO: 3065 - protein, 10 aa, Human papillomavirus
SLQDVSIACV

SEQ ID NO: 3066 - protein, 10 aa, Human papillomavirus
KLYSKISEYR

SEQ ID NO: 3067 - protein, 10 aa, Human papillomavirus
AVCDKCLKFR

SEQ ID NO: 3068 - protein, 10 aa, Human papillomavirus
LLIRCINCQK

SEQ ID NO: 3069 - protein, 10 aa, Human papillomavirus
DSVYGDTLER

SEQ ID NO: 3070 - protein, 9 aa, Human papillomavirus
HTMLCMCCR

SEQ ID NO: 3071 - protein, 10 aa, Human papillomavirus
ATTDLTIVYR

SEQ ID NO: 3072 - protein, 10 aa, Human papillomavirus
KVSEFRWYRY

SEQ ID NO: 3073 - protein, 9 aa, Human papillomavirus
SVYGTTLER

SEQ ID NO: 3074 - protein, 9 aa, Human papillomavirus
VSIACVYCK

SEQ ID NO: 3075 - protein, 10 aa, Human papillomavirus
RTEVYQFAFR

SEQ ID NO: 3076 - protein, 10 aa, Human papillomavirus
YSKISEYRHY

SEQ ID NO: 3077 - protein, 9 aa, Human papillomavirus
ISDYRHYCY

SEQ ID NO: 3078 - protein, 10 aa, Human papillomavirus
HTDTPTLHEY

SEQ ID NO: 3079 - protein, 10 aa, Human papillomavirus
LTDIEITCVY

SEQ ID NO: 3080 - protein, 10 aa, Human papillomavirus
YSDIRELRHY

SEQ ID NO: 3081 - protein, 11 aa, Human papillomavirus
TLEKLTNTGLY

SEQ ID NO: 3082 - protein, 9 aa, Human papillomavirus
LSSALEIPY

SEQ ID NO: 3083 - protein, 9 aa, Human papillomavirus
VSDFRWYRY

SEQ ID NO: 3084 - protein, 9 aa, Human papillomavirus
QTEPDTSNY

SEQ ID NO: 3085 - protein, 10 aa, Human papillomavirus
LTDVSIACVY

SEQ ID NO: 3086 - protein, 9 aa, Human papillomavirus
ATLERTEVY

SEQ ID NO: 3087 - protein, 10 aa, Human papillomavirus
ELDPVDLLCY

SEQ ID NO: 3088 - protein, 9 aa, Human papillomavirus
RFHNIRGRW

SEQ ID NO: 3089 - protein, 9 aa, Human papillomavirus
KFYSKISEF

SEQ ID NO: 3090 - protein, 10 aa, Human papillomavirus
TFCCKCDSTF

SEQ ID NO: 3091 - protein, 9 aa, Human papillomavirus
RFHNIAGHF

SEQ ID NO: 3092 - protein, 9 aa, Human papillomavirus
VYCKTVLEF

SEQ ID NO: 3093 - protein, 9 aa, Human papillomavirus
LYNLLIRCF

SEQ ID NO: 3094 - protein, 10 aa, Human papillomavirus
FYSKVSEFRW

SEQ ID NO: 3095 - protein, 9 aa, Human papillomavirus
RYSVYGTTL

SEQ ID NO: 3096 - protein, 9 aa, Human papillomavirus
VYGTTLEKF

SEQ ID NO: 3097 - protein, 9 aa, Human papillomavirus
VYQFAFKDL

SEQ ID NO: 3098 - protein, 10 aa, Human papillomavirus
FYSRIRELRF

SEQ ID NO: 3099 - DNA, 2385 bp, Human papillomavirus
aaactgcaggccgccaccatgggcatgcaggtgcagatccagagcctgttcctgctcctgctgtgggtgccaggaagcagaggcgtctacgattttgccttcgctgatctgaagctgtgcctgcggttcctcagcaagaatgccgagctggaccccgtggacctgctgtgctataaagccacattttgctgcaagtgtgactccacattcaaagcagcccgcactgaggtctatcagttcgcctttcggaacgcaggcatctgcaagctgtgtctgagattcgtcaaggctcagctcctgatgggcacagtgaatatcgtcaacgccgccatcaccgacattattctcgagtgtgtgtataaggctgccgcaatctctgattatcgccactactgctacaaattctattccaagatttctgaattcaaagctgccgccatcgtgtaccgcgatggaaatccctacaatgcagcatattccgacattcgcgagctccgccattataaggccgccgcaatctctgattataggcactacaattacaaagcagctaagctcaccaataaagggatttgcgacctgaatgctgcccggtttcacaatatcagaggacgctggaagttttacagcaaggtgtccgagttccgctggaaggccgtgtaccagtttgccttcaaagatctgaaggactctgtgtatggagatacactggagcgcaacgccaagatcagcgaatacaggcactacaacaggaaagccgccgctctcctgttttacagcaaggtcaggaaaggccctctgatcgacctgaggctgagctgtgtgaaggcaacactggagaaactcacaaacacaggcctctacgggctcagcagcgctctcgagatcccatacaaggcagccactctgcatgacatcatcctggaatgtgtgcgggtggtgcaacaactcctgatgggcgtggggtatatgctggatctccagccagaaactgtcggcctgctgactgtcacttgtcccctgggcgctgccgctgtctatggcaccaccctggaaaagtttaaagctcacacaatgctgtgtatgtgctgtagaaacgccactctggagtccatcaccaagaaaggagcaaggtactccgtgtacgggacaaccctcaaagctacaaccgacctgaccatcgtctatcgcaacgccagcctccaggatgtgagcatcgcatgcgtgaaagctgtgtattgcaagactgtgctggagtttaaactgactgacattgaaatcacttgcgtgtataagagattccacaatatcagcggcaggttcaaggctaaattcgtggctgcatggaccctcaaggccgccgctaagttcgccttcaaggacctcttcgtcgtcaagcaaaccgagcctgacacatctaactataatgtgtacggagctaccctggagtccattaagagagtgctctctaaaatctctgaatatcggaacgcatctgtctatgggacaacactggaaagaaacgcagccctcactgatctgctgatcaggtgctatggagccgcagcactcgtgtaccgggatgattttccaaagaaccatacagatacccctacactgcacgagtataatgcctttacctccaaggtcagaaagtaccgctacaaagctcctaccctgaaagagtacgtcctggacctgtacaaggccgccgctctgctcatcaggtgcattaactgtcagaagaagtccgtgtatggagacaccctggaaaaggtcaaggcagtgtgcgacaagtgcctcaaatttagaaaagccgctgctctgtacaacctcctgattaggtgcttcaaggccgctgccgtgtaccgggaagggaacccattcggcatcaagtccgtctacggagagacactcgaaaggaatgctaagctccctgacctctgtactgagctgaacgccgccgccgcaaccctggaacggaccgaggtgtataacgcaaggttccataatatcgctgggcattttaaggctgcatatgtgctggatctgtacccagagcccgtgaatgctgctgtgtacaacttcgcatgtactgagctgaaagccgctaaagtcagcgagtttagatggtaccggtacaaagcagcatctctccaggacattgaaattacttgcgtgaaagctgtgtccattgcatgtgtctactgcaagaaggccgctgccttttactctcggatcagagaactcagattcaaagccgccgccctcaccgatgtgagcattgcttgtgtgtataacgctgccccttacgcagtctgtagagtgtgtctgtttaacgctgccttcaccgacctcaccattgtgtactgacgcggatccgcg

SEQ ID NO: 3100 - DNA, 2433 bp, Human papillomavirus
aaactgcaggccgccaccatgggcatgcaggtgcagatccagagcctgttcctgctcctgctgtgggtgccaggaagcagaggcacactcgagaaactgacaaacaccgggctctataacgcagccgctgctactctcgagagcattaccaagaagaatgccaccctccacgacatcatcctcgaatgcgtgaaatatatgctggacctccagccagagaccgtcaacgccgcagtgtacggcactactctggagaaattcaaggcagccggactgctgactgtgacttgccctctcaacgctgccgcccacaccatgctgtgcatgtgttgccggaacgccgcaaccaccgacctgacaatcgtgtacaggaacgccgcactgtcctccgccctggagattccctacaaggccgcagcccgctactctgtctacggcacaactctcaaggcagctcgggtggtgcagcagctgctcatgggcgtgaatgcagccgccgccacactggaacgcactgaagtctataatgccgcctttaccgacctcacaattgtgtatggcctgacagatgtgtctatcgcttgtgtgtataacgtgtacaattttgcctgcacagaactgaaggcagccgtctccatcgcttgcgtctactgtaagaagaaggtctccgaatttaggtggtacagatataagttctattctcggattagggagctcagattcaaggctgccagcctgcaagatatcgagatcacatgcgtgaaggccgcctacgtgctggacctgtaccccgaacctgtcaatgctgctcggtttcacaatattgcaggccattttaagccctatgctgtgtgccgggtgtgtctcttcaatgtctacggggcaacactggagagcattaaggccgcagctagcgtgtatgggacaactctggaaaggaatgcatccctgcaagatgtgagcattgcctgcgtgaaggccgctgccagggtgctgagcaagatctccgaataccggaacgctgccgctaaattcgtcgctgcttggactctcaaggctgctgccaaagccgccgctgtgtactgcaagactgtgctcgaattcaagcgctttcacaacatctctggcagatttaaattcgcatttaaggatctgttcgtggtgaaagcactgaccgatatcgaaattacctgcgtgtacaagctgaccgacctgctgatcagatgttataatcagaccgaacccgataccagcaactacggacggactgaggtctaccagttcgctttcagaaatgctaagttttacagcaaaattagcgagttcaaggtctatgattttgccttcgcagacctgaagatcacagatatcattctggagtgcgtgtacaaggctgccgcaaaactgtgtctcagattcctctccaagaatgccacattttgttgtaagtgcgactctacatttaaagctgcccagctcctcatgggaaccgtgaatatcgtgaacgccggaatctgcaagctgtgtctgagatttgtcaaagccgagctggaccctgtggacctgctgtgctataaggccgccgcaatctctgattatcgccactactgttataaagctgctgccatcgtgtatagagatggcaacccttacggggctgcatccgtctatggagagactctggaacgcaacgccgcagtgtgtgacaagtgtctgaagttcagaaaagcctttacctctaaagtcaggaagtacaggtataaagcagcaagcgtctatggggacaccctggagaaagtgaaggccgctgccctgtacaatctgctcatccggtgtttcaaggcagccgccctgctgattaggtgcatcaactgccagaagaaagctgtctacagggaaggcaaccccttcggcatcaaggcactggtgtacagggacgacttccctaagaacccaactctcaaagagtatgtgctcgacctgtacaaactgccagacctctgcaccgaactcaaccatacagatacaccaaccctgcacgagtacggcgcagccgctgcactgctgttctacagcaaggtcagaaagaacgctgcttattctgatatcagagagctcaggcattacaaagctgccgattccgtgtatggagataccctggagcggaacgctaaactcaccaacaagggaatctgtgatctcaatgccgtctaccaattcgcttttaaagacctgaaggctgccgcaaagatctctgagtaccggcattataaccgcaaggccgccgctatttccgactacagacattataattacaagttttactccaaagtctctgagttccgctggaaagcagctcgcttccacaatattcgcggacgctggaagccactcattgacctgaggctgagctgtgtgtgacgcggatccgcg

SEQ ID NO: 3101 - DNA, 1656 bp, Human papillomavirus
aaactgcaggccgccaccatgggcatgcaggtgcagatccagagcctgttcctgctcctgctgtgggtgccaggaagcagaggcaggacagaggtgtaccaatttgctttcaggaacgccgcagtgtatggaacaacactggagaagttcaaagccttcgctttcaaggacctgttcgtcgtgaaggccattaccgacattatcctcgagtgcgtgtacaaggccgctgccgtgtctattgcctgcgtgtattgcaagaaggcactcctgattcgctgcatcaattgccagaagaaagcactctacaatctcctgattcgctgtttcaaagccgccagcgtgtacggcgataccctggagaaagtgaaggccctgacagatgtgtccatcgcctgcgtgtacaacgtctatcagttcgcattcaaggacctcaaagctaccctcgaaagaacagaagtgtatggagccgctgcaacactggagaagctcaccaacaccgggctgtataacgccgccgcccataccatgctgtgcatgtgttgcagaaatgccgaactggacccagtggacctcctctgctataaggctgctgctattagcgattaccggcattactgttataaggcagcaactctccacgacattatcctggagtgtgtgaagagatttcacaatattgcagggcatttcaaagcaaagtttgtggccgcctggacactgaaggcagccgccaaggctgctgcctacgtcctggatctgtacccagagcccgtgaatgctgcccggtttcacaacatcagaggccgctggaagttctattccaagatctccgagttcaaggccgctgctatcgtctacagagacgggaacccttatggcgctgccgcagtgtactgcaagactgtgctggagtttaagtttactgatctcaccatcgtctacaaccacaccgacacacctacactgcacgagtacaacgcagcagccttctattccaggattagagaactgcgcttcaaagctgctaaactgaccaacaagggaatctgcgatctgaatgctgtctgtgacaagtgcctcaagttcagaaaggctgccgccagcgtctacggagagactctggaacggaaccagaccgagcccgatactagcaactatggccggtactctgtgtacggcaccacactgaagtctctccaggacattgagatcacttgtgtcaaatccgtctatggcaccaccctggagcggaatgcttctctccaggacgtcagcatcgcctgtgtcaagctgccagacctgtgtaccgaactgaatgctgccgcaacattctgctgtaaatgtgacagcacctttaaggcagccaaggtctctgagttcaggtggtacagatacaaattctacagcaaagtgagcgagttccgctggaaagctgcttatatgctggacctccagccagagactgtgaatgccctgtcttccgccctggaaatcccttataaatatagcgatatccgcgagctccggcattacaaggccgcagactccgtgtacggagatactctggagaggaacgctgctctgactgatatcgaaatcacttgtgtgtacaaggcaactaccgatctgacaatcgtgtataggtgaggatccgcg

SEQ ID NO: 3102 - DNA, 1665 bp, Human papillomavirus
aaactgcaggccgccaccatgggcatgcaggtgcagatccagagcctgttcctgctcctgctgtgggtgccaggaagcagaggctctgtgtacggcaccaccctggaaagaaacgccagcctccaggatatcgaaatcacctgcgtgaaatctgtgtacggggaaactctcgagagaaatgccgctgtgtgcgacaagtgcctgaagttcaggaaggcaaagctgactaacaaaggcatttgtgatctcgggaggtacagcgtctacggcaccacactgaagcagacagagcctgacacctctaattacggggcagctgccgtgtattgcaaaactgtgctggagttcaaacatactgatacacccaccctgcacgagtacaatgctgccgcattctactctcgcattagagagctcaggtttaagttcactgacctgaccatcgtctacaatgtgtacggcaccaccctggagaagttcaaagctgccgccctcctgatccggtgcatcaattgtcagaagaaagctgtgtaccagttcgcattcaaggacctgaagagcgtgtacggagacacactggagaaagtgaaggctgccgccctgtataacctgctgatccggtgttttaaggctgctgccgtctccatcgcctgtgtctactgtaagaaagcaatcaccgatatcattctggagtgtgtgtataaagccgcagctcgcactgaggtgtaccaatttgcattcagaaacgccaccctcgagcgcaccgaagtgtataatgcagccgccttcgcttttaaagatctgtttgtggtcaaggcactgacagacgtgtccatcgcttgtgtctataatgccgcctattctgatattagagaactgaggcactataaagtcagcgagttccgctggtatagatataaggccgcagccctcacagacattgagatcacctgcgtctataaggctgccgccgacagcgtgtacggggacaccctcgagcggaacgcaagcctccaggatgtgagcatcgcttgcgtgaaggctgcctacatgctggatctgcaacccgagactgtgaacgcagctgctactttctgctgcaagtgcgattccacatttaaggcaaccactgacctgactattgtctacagaaacgccgctctctccagcgccctggagatcccatataaagcagccttttattccaaggtgtccgagtttaggtggaaagccgccaagctgcctgacctgtgtactgaactcggacggtttcacaacattgcaggccacttcaaggccgcatatgtcctggacctctaccctgaaccagtcaatgccattgtctaccgcgatggaaacccatacaacgctaggttccataatatccggggacggtggaaggaactggacccagtggacctgctgtgttataaagctcatacaatgctgtgcatgtgttgtaggaacgccacactccacgacattattctggaatgcgtgaaagcagcagctgctaagttcgtggctgcctggacactgaaggcagccgccaaaatctccgattaccgccattactgctataagttttactctaagattagcgagttcaaggctgccaccctcgagaaactgacaaacacaggcctctattgacgcggatccgcg

SEQ ID NO: 3103 - protein, 762 aa, Human papillomavirus
VYDFAFADLKLCLRFLSKNAELDPVDLLCYKATFCCKCDSTFKAARTEVYQFAFRNAGICKLCLRFVKAQLLMGTVNIVNAAITDIILECVYKAAAISDYRHYCYKFYSKISEFKAAAIVYRDGNPYNAAYSDIRELRHYKAAAISDYRHYNYKAAKLTNKGICDLNAARFHNIRGRWKFYSKVSEFRWKAVYQFAFKDLKDSVYGDTLERNAKISEYRHYNRKAAALLFYSKVRKGPLIDLRLSCVKATLEKLTNTGLYGLSSALEIPYKAATLHDIILECVRVVQQLLMGVGYMLDLQPETVGLLTVTCPLGAAAVYGTTLEKFKAHTMLCMCCRNATLESITKKGARYSVYGTTLKATTDLTIVYRNASLQDVSIACVKAVYCKTVLEFKLTDIEITCVYKRFHNISGRFKAKFVAAWTLKAAAKFAFKDLFVVKQTEPDTSNYNVYGATLESIKRVLSKISEYRNASVYGTTLERNAALTDLLIRCYGAAALVYRDDFPKNHTDTPTLHEYNAFTSKVRKYRYKAPTLKEYVLDLYKAAALLIRCINCQKKSVYGDTLEKVKAVCDKCLKFRKAAALYNLLIRCFKAAAVYREGNPFGIKSVYGETLERNAKLPDLCTELNAAAATLERTEVYNARFHNIAGHFKAAYVLDLYPEPVNAAVYNFACTELKAAKVSEFRWYRYKAASLQDIEITCVKAVSIACVYCKKAAAFYSRIRELRFKAAALTDVSIACVYNAAPYAVCRVCLFNAAFTDLTIVY

SEQ ID NO: 3104 - protein, 778 aa, Human papillomavirus
TLEKLTNTGLYNAAAATLESITKKNATLHDIILECVKYMLDLQPETVNAAVYGTTLEKFKAAGLLTVTCPLNAAAHTMLCMCCRNAATTDLTIVYRNAALSSALEIPYKAAARYSVYGTTLKAARVVQQLLMGVNAAAATLERTEVYNAAFTDLTIVYGLTDVSIACVYNVYNFACTELKAAVSIACVYCKKKVSEFRWYRYKFYSRIRELRFKAASLQDIEITCVKAAYVLDLYPEPVNAARFHNIAGHFKPYAVCRVCLFNVYGATLESIKAAASVYGTTLERNASLQDVSIACVKAAARVLSKISEYRNAAAKFVAAWTLKAAAKAAAVYCKTVLEFKRFHNISGRFKFAFKDLFVVKALTDIEITCVYKLTDLLIRCYNQTEPDTSNYGRTEVYQFAFRNAKFYSKISEFKVYDFAFADLKITDIILECVYKAAAKLCLRFLSKNATFCCKCDSTFKAAQLLMGTVNIVNAGICKLCLRFVKAELDPVDLLCYKAAAISDYRHYCYKAAAIVYRDGNPYGAASVYGETLERNAAVCDKCLKFRKAFTSKVRKYRYKAASVYGDTLEKVKAAALYNLLIRCFKAAALLIRCINCQKKAVYREGNPFGIKALVYRDDFPKNPTLKEYVLDLYKLPDLCTELNHTDTPTLHEYGAAAALLFYSKVRKNAAYSDIRELRHYKAADSVYGDTLERNAKLTNKGICDLNAVYQFAFKDLKAAAKISEYRHYNRKAAAISDYRHYNYKFYSKVSEFRWKAARFHNIRGRWKPLIDLRLSCV

SEQ ID NO: 3105 - protein, 520 aa, Human papillomavirus
RTEVYQFAFRNAAVYGTTLEKFKAFAFKDLFVVKAITDIILECVYKAAAVSIACVYCKKALLIRCINCQKKALYNLLIRCFKAASVYGDTLEKVKALTDVSIACVYNVYQFAFKDLKATLERTEVYGAAATLEKLTNTGLYNAAAHTMLCMCCRNAELDPVDLLCYKAAAISDYRHYCYKAATLHDIILECVKRFHNIAGHFKAKFVAAWTLKAAAKAAAYVLDLYPEPVNAARFHNIRGRWKFYSKISEFKAAAIVYRDGNPYGAAAVYCKTVLEFKFTDLTIVYNHTDTPTLHEYNAAAFYSRIRELRFKAAKLTNKGICDLNAVCDKCLKFRKAAASVYGETLERNQTEPDTSNYGRYSVYGTTLKSLQDIEITCVKSVYGTTLERNASLQDVSIACVKLPDLCTELNAAATFCCKCDSTFKAAKVSEFRWYRYKFYSKVSEFRWKAAYMLDLQPETVNALSSALEIPYKYSDIRELRHYKAADSVYGDTLERNAALTDIEITCVYKATTDLTIVYR

SEQ ID NO: 3106 - protein, 522 aa, Human papillomavirus
SVYGTTLERNASLQDIEITCVKSVYGETLERNAAVCDKCLKFRKAKLTNKGICDLGRYSVYGTTLKQTEPDTSNYGAAAVYCKTVLEFKHTDTPTLHEYNAAAFYSRIRELRFKFTDLTIVYNVYGTTLEKFKAAALLIRCINCQKKAVYQFAFKDLKSVYGDTLEKVKAAALYNLLIRCFKAAAVSIACVYCKKAITDIILECVYKAAARTEVYQFAFRNATLERTEVYNAAAFAFKDLFVVKALTDVSIACVYNAAYSDIRELRHYKVSEFRWYRYKAAALTDIEITCVYKAAADSVYGDTLERNASLQDVSIACVKAAYMLDLQPETVNAAATFCCKCDSTFKATTDLTIVYRNAALSSALEIPYKAAFYSKVSEFRWKAAKLPDLCTELGRFHNIAGHFKAAYVLDLYPEPVNAIVYRDGNPYNARFHNIRGRWKELDPVDLLCYKAHTMLCMCCRNATLHDIILECVKAAAAKFVAAWTLKAAAKISDYRHYCYKFYSKISEFKAATLEKLTNTGLY

SEQ ID NO: 3107 - DNA, 2379 bp, Human papillomavirus
aaactgcaggccgccaccatgggcatgcaggtgcagatccagagcctgttcctgctcctgctgtgggtgccaggaagcagaggcgtctacgattttgccttcgctgatctgaagctgtgcctgcggttcctcagcaagaatgccgagctggaccccgtggacctgctgtgctataaagccacattttgctgcaagtgtgactccacattcaaagcagcccgcactgaggtctatcagttcgcctttcggaacgcaggcatctgcaagctgtgtctgagattcgtcaaggctcagctcctgatgggcacagtgaatatcgtcggagctgcagccatctctgactacaggcactactgctataaggctgccaagctgtacagcaagatttccgagtatcggaagtacagcaaaatctctgaataccgccattacaagttctacagcaaaatctccgagttcaaatattccgacattcgcgagctccgccattataaggccgccgcaatctctgattataggcactacaattacaaagcagctaagctcaccaataaagggatttgcgacctgaatgctgcccggtttcacaatatcagaggacgctggaagttttacagcaaggtgtccgagttccgctggaaggccgtgtaccagtttgccttcaaagatctgaaggactctgtgtatggagatacactggagcgcaacgccaagatcagcgaatacaggcactacaacaggaaagccgccgctctcctgttttacagcaaggtcaggaaaggccctctgatcgacctgaggctgagctgtgtgaaggcaacactggagaaactcacaaacacaggcctctacgggctcagcagcgctctcgagatcccatacaaggcagccactctgcatgacatcatcctggaatgtgtgcgggtggtgcaacaactcctgatgggcgtggggtatatgctggatctccagccagaaactgtcggcctgctgactgtcacttgtcccctgggcgctgccgctgtctatggcaccaccctggaaaagtttaaagctcacacaatgctgtgtatgtgctgtagaaacgccactctggagtccatcaccaagaaaggagcaaggtactccgtgtacgggacaaccctcaaagctacaaccgacctgaccatcgtctatcgcaacgccagcctccaggatgtgagcatcgcatgcgtgaaagctgtgtattgcaagactgtgctggagtttaaactgactgacattgaaatcacttgcgtgtataagagattccacaatatcagcggcaggttcaaggctaaattcgtggctgcatggaccctcaaggccgccgctaagttcgccttcaaggacctcttcgtcgtcaagcaaaccgagcctgacacatctaactataatgtgtacggagctaccctggagtccattaagagagtgctctctaaaatctctgaatatcggaacgcatctgtctatgggacaacactggaaagaaacgcagccctcactgatctgctgatcaggtgctatggagccgcagcactcgtgtaccgggatgattttccaaagaaccatacagatacccctacactgcacgagtataatgcctttacctccaaggtcagaaagtaccgctacaaagctcctaccctgaaagagtacgtcctggacctgtacaaggccgccgctctgctcatcaggtgcattaactgtcagaagaagtccgtgtatggagacaccctggaaaaggtcaaggcagtgtgcgacaagtgcctcaaatttagaaaagccgctgctctgtacaacctcctgattaggtgcttcaaggccgctgccgtgtaccgggaagggaacccattcggcatcaagtccgtctacggagagacactcgaaaggaatgctaagctccctgacctctgtactgagctgaacgccgccgccgcaaccctggaacggaccgaggtgtataacgcaaggttccataatatcgctgggcattttaaggctgcatatgtgctggatctgtacccagagcccgtgaatgctgctgtgtacaacttcgcatgtactgagctgaaagccgctaaagtcagcgagtttagatggtaccggtacaaagcagcatctctccaggacattgaaattacttgcgtgaaagctgtgtccattgcatgtgtctactgcaagaaggccgctgccttttactctcggatcagagaactcagattcaaagccgccgccctcaccgatgtgagcattgcttgtgtgtataacgctgccccttacgcagtctgtagagtgtgtctgtttggagcagccgctgtgagcgacttcagatggtataggtactgacgcggatccgcg

SEQ ID NO: 3108 - DNA, 2445 bp, Human papillomavirus
aaactgcaggccgccaccatgggcatgcaggtgcagatccagagcctgttcctgctcctgctgtgggtgccaggaagcagaggcacactcgagaaactgacaaacaccgggctctataacgcagccgctgctactctcgagagcattaccaagaagaatgccaccctccacgacatcatcctcgaatgcgtgaaatatatgctggacctccagccagagaccgtcaacgccgcagtgtacggcactactctggagaaattcaaggcagccggactgctgactgtgacttgccctctcaacgctgccgcccacaccatgctgtgcatgtgttgccggaacgccgcaaccaccgacctgacaatcgtgtacaggaacgccgcactgtcctccgccctggagattccctacaaggccgcagcccgctactctgtctacggcacaactctcaaggcagctcgggtggtgcagcagctgctcatgggcgtgaatgcagccgccgccacactggaacgcactgaagtctatggcgctgccgccgtgagcgacttcagatggtataggtacaaggccgcagccctgacagatgtgtctatcgcttgtgtgtataacgtgtacaattttgcctgcacagaactgaaggcagccgtctccatcgcttgcgtctactgtaagaagaaggtctccgaatttaggtggtacagatataagttctattctcggattagggagctcagattcaaggctgccagcctgcaagatatcgagatcacatgcgtgaaggccgcctacgtgctggacctgtaccccgaacctgtcaatgctgctcggtttcacaatattgcaggccattttaagccctatgctgtgtgccgggtgtgtctcttcaatgtctacggggcaacactggagagcattaaggccgcagctagcgtgtatgggacaactctggaaaggaatgcatccctgcaagatgtgagcattgcctgcgtgaaggccgctgccagggtgctgagcaagatctccgaataccggaacgctgccgctaaattcgtcgctgcttggactctcaaggctgctgccaaagccgccgctgtgtactgcaagactgtgctcgaattcaagcgctttcacaacatctctggcagatttaaattcgcatttaaggatctgttcgtggtgaaagcactgaccgatatcgaaattacctgcgtgtacaagctgaccgacctgctgatcagatgttataatcagaccgaacccgataccagcaactacggacggactgaggtctaccagttcgctttcagaaatgctaagttttacagcaaaattagcgagttcaaggtctatgattttgccttcgcagacctgaaagcatactctaagatctccgagtatagacactacaaggctgccaaactgtgtctcagattcctctccaagaatgccacattttgttgtaagtgcgactctacatttaaagctgcccagctcctcatgggaaccgtgaatatcgtgaacgccggaatctgcaagctgtgtctgagatttgtcaaagccgagctggaccctgtggacctgctgtgctataaggccgccgcaatctctgattatcgccactactgttataaggctgcaaaactgtactccaaaatctctgagtatagaaaggcctccgtctatggagagactctggaacgcaacgccgcagtgtgtgacaagtgtctgaagttcagaaaagcctttacctctaaagtcaggaagtacaggtataaagcagcaagcgtctatggggacaccctggagaaagtgaaggccgctgccctgtacaatctgctcatccggtgtttcaaggcagccgccctgctgattaggtgcatcaactgccagaagaaagctgtctacagggaaggcaaccccttcggcatcaaggcactggtgtacagggacgacttccctaagaacccaactctcaaagagtatgtgctcgacctgtacaaactgccagacctctgcaccgaactcaaccatacagatacaccaaccctgcacgagtacggcgcagccgctgcactgctgttctacagcaaggtcagaaagaacgctgcttattctgatatcagagagctcaggcattacaaagctgccgattccgtgtatggagataccctggagcggaacgctaaactcaccaacaagggaatctgtgatctcaatgccgtctaccaattcgcttttaaagacctgaaggctgccgcaaagatctctgagtaccggcattataaccgcaaggccgccgctatttccgactacagacattataattacaagttttactccaaagtctctgagttccgctggaaagcagctcgcttccacaatattcgcggacgctggaagccactcattgacctgaggctgagctgtgtgtgacgcggatccgcg

SEQ ID NO: 3109 - DNA, 1656 bp, Human papillomavirus
aaactgcaggccgccaccatgggcatgcaggtgcagatccagagcctgttcctgctcctgctgtgggtgccaggaagcagaggcaggacagaggtgtaccaatttgctttcaggaacgccgcagtgtatggaacaacactggagaagttcaaagccttcgctttcaaggacctgttcgtcgtgaaggcctactccaagatctctgagtacagacactataaggccgctgccgtgtctattgcctgcgtgtattgcaagaaggcactcctgattcgctgcatcaattgccagaagaaagcactctacaatctcctgattcgctgtttcaaagccgccagcgtgtacggcgataccctggagaaagtgaaggccctgacagatgtgtccatcgcctgcgtgtacaacgtctatcagttcgcattcaaggacctcaaagctaccctcgaaagaacagaagtgtatggagccgctgcaacactggagaagctcaccaacaccgggctgtataacgccgccgcccataccatgctgtgcatgtgttgcagaaatgccgaactggacccagtggacctcctctgctataaggctgctgctattagcgattaccggcattactgttataaggcagcaactctccacgacattatcctggagtgtgtgaagagatttcacaatattgcagggcatttcaaagcaaagtttgtggccgcctggacactgaaggcagccgccaaggctgctgcctacgtcctggatctgtacccagagcccgtgaatgctgcccggtttcacaacatcagaggccgctggaagttctattccaagatctccgagttcaaagtgtccgacttcaggtggtatcgctataaggccgctaaactctacagcaagatctctgaataccggaaggcagccgtctactgcaagacagtgctggagtttaaacacaccgacacacctacactgcacgagtacaacgcagcagccttctattccaggattagagaactgcgcttcaaagctgctaaactgaccaacaagggaatctgcgatctgaatgctgtctgtgacaagtgcctcaagttcagaaaggctgccgccagcgtctacggagagactctggaacggaaccagaccgagcccgatactagcaactatggccggtactctgtgtacggcaccacactgaagtctctccaggacattgagatcacttgtgtcaaatccgtctatggcaccaccctggagcggaatgcttctctccaggacgtcagcatcgcctgtgtcaagctgccagacctgtgtaccgaactgaatgctgccgcaacattctgctgtaaatgtgacagcacctttaaggcagccaaggtctctgagttcaggtggtacagatacaaattctacagcaaagtgagcgagttccgctggaaagctgcttatatgctggacctccagccagagactgtgaatgccctgtcttccgccctggaaatcccttataaatatagcgatatccgcgagctccggcattacaaggccgcagactccgtgtacggagatactctggagaggaacgctgctctgactgatatcgaaatcacttgtgtgtacaaggcaactaccgatctgacaatcgtgtataggtgaggatccgcg

SEQ ID NO: 3110 - DNA, 1656 bp, Human papillomavirus
aaactgcaggccgccaccatgggcatgcaggtgcagatccagagcctgttcctgctcctgctgtgggtgccaggaagcagaggctctgtgtacggcaccaccctggaaagaaacgccagcctccaggatatcgaaatcacctgcgtgaaatctgtgtacggggaaactctcgagagaaatgccgctgtgtgcgacaagtgcctgaagttcaggaaggcaaagctgactaacaaaggcatttgtgatctcgggaggtacagcgtctacggcaccacactgaagcagacagagcctgacacctctaattacggggcagctgccgtgtattgcaaaactgtgctggagttcaaacatactgatacacccaccctgcacgagtacaatgctgccgcattctactctcgcattagagagctcaggtttaagtactccaagatctctgagtacagacactataaagtgtacggcaccaccctggagaagttcaaagctgccgccctcctgatccggtgcatcaattgtcagaagaaagctgtgtaccagttcgcattcaaggacctgaagagcgtgtacggagacacactggagaaagtgaaggctgccgccctgtataacctgctgatccggtgttttaaggctgctgccgtctccatcgcctgtgtctactgtaagaaagcagtgagtgacttcagatggtacaggtataagcgcactgaggtgtaccaatttgcattcagaaacgccaccctcgagcgcaccgaagtgtataatgcagccgccttcgcttttaaagatctgtttgtggtcaaggcactgacagacgtgtccatcgcttgtgtctataatgccgcctattctgatattagagaactgaggcactataaagtcagcgagttccgctggtatagatataaggccgcagccctcacagacattgagatcacctgcgtctataaggctgccgccgacagcgtgtacggggacaccctcgagcggaacgcaagcctccaggatgtgagcatcgcttgcgtgaaggctgcctacatgctggatctgcaacccgagactgtgaacgcagctgctactttctgctgcaagtgcgattccacatttaaggcaaccactgacctgactattgtctacagaaacgccgctctctccagcgccctggagatcccatataaagcagccttttattccaaggtgtccgagtttaggtggaaagccgccaagctgcctgacctgtgtactgaactcggacggtttcacaacattgcaggccacttcaaggccgcatatgtcctggacctctaccctgaaccagtcaacaaactgtattctaagatctccgagtacagaaagaggttccataatatccggggacggtggaaggaactggacccagtggacctgctgtgttataaagctcatacaatgctgtgcatgtgttgtaggaacgccacactccacgacattattctggaatgcgtgaaagcagcagctgctaagttcgtggctgcctggacactgaaggcagccgccaaaatctccgattaccgccattactgctataagttttactctaagattagcgagttcaaggctgccaccctcgagaaactgacaaacacaggcctctattgacgcggatccgcg

SEQ ID NO: 3111 - protein, 760 aa, Human papillomavirus
VYDFAFADLKLCLRFLSKNAELDPVDLLCYKATFCCKCDSTFKAARTEVYQFAFRNAGICKLCLRFVKAQLLMGTVNIVGAAAISDYRHYCYKAAKLYSKISEYRKYSKISEYRHYKFYSKISEFKYSDIRELRHYKAAAISDYRHYNYKAAKLTNKGICDLNAARFHNIRGRWKFYSKVSEFRWKAVYQFAFKDLKDSVYGDTLERNAKISEYRHYNRKAAALLFYSKVRKGPLIDLRLSCVKATLEKLTNTGLYGLSSALEIPYKAATLHDIILECVRVVQQLLMGVGYMLDLQPETVGLLTVTCPLGAAAVYGTTLEKFKAHTMLCMCCRNATLESITKKGARYSVYGTTLKATTDLTIVYRNASLQDVSIACVKAVYCKTVLEFKLTDIEITCVYKRFHNISGRFKAKFVAAWTLKAAAKFAFKDLFVVKQTEPDTSNYNVYGATLESIKRVLSKISEYRNASVYGTTLERNAALTDLLIRCYGAAALVYRDDFPKNHTDTPTLHEYNAFTSKVRKYRYKAPTLKEYVLDLYKAAALLIRCINCQKKSVYGDTLEKVKAVCDKCLKFRKAAALYNLLIRCFKAAAVYREGNPFGIKSVYGETLERNAKLPDLCTELNAAAATLERTEVYNARFHNIAGHFKAAYVLDLYPEPVNAAVYNFACTELKAAKVSEFRWYRYKAASLQDIEITCVKAVSIACVYCKKAAAFYSRIRELRFKAAALTDVSIACVYNAAPYAVCRVCLFGAAAVSDFRWYRY

SEQ ID NO: 3112 - protein, 782 aa, Human papillomavirus
TLEKLTNTGLYNAAAATLESITKKNATLHDIILECVKYMLDLQPETVNAAVYGTTLEKFKAAGLLTVTCPLNAAAHTMLCMCCRNAATTDLTIVYRNAALSSALEIPYKAAARYSVYGTTLKAARVVQQLLMGVNAAAATLERTEVYGAAAVSDFRWYRYKAAALTDVSIACVYNVYNFACTELKAAVSIACVYCKKKVSEFRWYRYKFYSRIRELRFKAASLQDIEITCVKAAYVLDLYPEPVNAARFHNIAGHFKPYAVCRVCLFNVYGATLESIKAAASVYGTTLERNASLQDVSIACVKAAARVLSKISEYRNAAAKFVAAWTLKAAAKAAAVYCKTVLEFKRFHNISGRFKFAFKDLFVVKALTDIEITCVYKLTDLLIRCYNQTEPDTSNYGRTEVYQFAFRNAKFYSKISEFKVYDFAFADLKAYSKISEYRHYKAAKLCLRFLSKNATFCCKCDSTFKAAQLLMGTVNIVNAGICKLCLRFVKAELDPVDLLCYKAAAISDYRHYCYKAAKLYSKISEYRKASVYGETLERNAAVCDKCLKFRKAFTSKVRKYRYKAASVYGDTLEKVKAAALYNLLIRCFKAAALLIRCINCQKKAVYREGNPFGIKALVYRDDFPKNPTLKEYVLDLYKLPDLCTELNHTDTPTLHEYGAAAALLFYSKVRKNAAYSDIRELRHYKAADSVYGDTLERNAKLTNKGICDLNAVYQFAFKDLKAAAKISEYRHYNRKAAAISDYRHYNYKFYSKVSEFRWKAARFHNIRGRWKPLIDLRLSCV

SEQ ID NO: 3113 - protein, 520 aa, Human papillomavirus
RTEVYQFAFRNAAVYGTTLEKFKAFAFKDLFVVKAYSKISEYRHYKAAAVSIACVYCKKALLIRCINCQKKALYNLLIRCFKAASVYGDTLEKVKALTDVSIACVYNVYQFAFKDLKATLERTEVYGAAATLEKLTNTGLYNAAAHTMLCMCCRNAELDPVDLLCYKAAAISDYRHYCYKAATLHDIILECVKRFHNIAGHFKAKFVAAWTLKAAAKAAAYVLDLYPEPVNAARFHNIRGRWKFYSKISEFKVSDFRWYRYKAAKLYSKISEYRKAAVYCKTVLEFKHTDTPTLHEYNAAAFYSRIRELRFKAAKLTNKGICDLNAVCDKCLKFRKAAASVYGETLERNQTEPDTSNYGRYSVYGTTLKSLQDIEITCVKSVYGTTLERNASLQDVSIACVKLPDLCTELNAAATFCCKCDSTFKAAKVSEFRWYRYKFYSKVSEFRWKAAYMLDLQPETVNALSSALEIPYKYSDIRELRHYKAADSVYGDTLERNAALTDIEITCVYKATTDLTIVYR

SEQ ID NO: 3114 - protein, 519 aa, Human papillomavirus
SVYGTTLERNASLQDIEITCVKSVYGETLERNAAVCDKCLKFRKAKLTNKGICDLGRYSVYGTTLKQTEPDTSNYGAAAVYCKTVLEFKHTDTPTLHEYNAAAFYSRIRELRFKYSKISEYRHYKVYGTTLEKFKAAALLIRCINCQKKAVYQFAFKDLKSVYGDTLEKVKAAALYNLLIRCFKAAAVSIACVYCKKAVSDFRWYRYKRTEVYQFAFRNATLERTEVYNAAAFAFKDLFVVKALTDVSIACVYNAAYSDIRELRHYKVSEFRWYRYKAAALTDIEITCVYKAAADSVYGDTLERNASLQDVSIACVKAAYMLDLQPETVNAAATFCCKCDSTFKATTDLTIVYRNAALSSALEIPYKAAFYSKVSEFRWKAAKLPDLCTELGRFHNIAGHFKAAYVLDLYPEPVNKLYSKISEYRKRFHNIRGRWKELDPVDLLCYKAHTMLCMCCRNATLHDIILECVKAAAAKFVAAWTLKAAAKISDYRHYCYKFYSKISEFKAATLEKLTNTGLY

SEQ ID NO: 3115 - DNA, 1662 bp, Human papillomavirus
aaactgcaggccgccaccatgggcatgcaggtgcagatccagagcctgttcctgctcctgctgtgggtgccaggaagcagaggcaggacagaggtgtaccaatttgctttcaggaacgccgcagtgtatggaacaacactggagaagttcaaagccttcgctttcaaggacctgttcgtcgtgaaggcctactccaagatctctgagtacagacactataaggccgctgccgtgtctattgcctgcgtgtattgcaagaacgcactcctgattcgctgcatcaattgccagaagaacgccgcactctacaatctcctgattcgctgtttcaaagccgccagcgtgtacggcgataccctggagaaagtgaaggccctgacagatgtgtccatcgcctgcgtgtacaacgtctatcagttcgcattcaaggacctcaaagctaccctcgaaagaacagaagtgtatggagccgctgcaacactggagaagctcaccaacaccgggctgtataacgccgccgcccataccatgctgtgcatgtgttgcagaggagccgaactggacccagtggacctcctctgctataaggctgctgctattagcgattaccggcattactgttataaggcagcaactctccacgacattatcctggagtgtgtgaagagatttcacaatattgcagggcatttcaaagcaaagtttgtggccgcctggacactgaaggcagccgccaaggctgctgcctacgtcctggatctgtacccagagcccgtgaatgctgcccggtttcacaacatcagaggccgctggaagttctattccaagatctccgagttcaaagtgtccgacttcaggtggtatcgctataaggccgctaaactctacagcaagatctctgaataccggaaggcagccgtctactgcaagacagtgctggagtttaaacacaccgacacacctacactgcacgagtacaacgcagcagccttctattccaggattagagaactgcgcttcaaagctgctaaactgaccaacaagggaatctgcgatctgaatgctgtctgtgacaagtgcctcaagttcagaaatgctgccgccagcgtctacggagagactctggaacggaaccagaccgagcccgatactagcaactatggccggtactctgtgtacggcaccacactgaagtctctccaggacattgagatcacttgtgtcaaatccgtctatggcaccaccctggagcggaatgcttctctccaggacgtcagcatcgcctgtgtcaagctgccagacctgtgtaccgaactgaatgctgccgcaacattctgctgtaaatgtgacagcacctttaaggcagccaaggtctctgagttcaggtggtacagatacaacgccttctacagcaaagtgagcgagttccgctggaaagctgcttatatgctggacctccagccagagactgtgaatgccctgtcttccgccctggaaatcccttataaatatagcgatatccgcgagctccggcattacaaggccgcagactccgtgtacggagatactctggagaggaacgctgctctgactgatatcgaaatcacttgtgtgtacaaggcaactaccgatctgacaatcgtgtataggtgaggatccgcg

SEQ ID NO: 3116 - DNA, 1677 bp, Human papillomavirus
aaactgcaggccgccaccatgggcatgcaggtgcagatccagagcctgttcctgctcctgctgtgggtgccaggaagcagaggcaggacagaggtgtaccaatttgctttcaggaacgccgcagtgtatggaacaacactggagaagttcaaagccttcgctttcaaggacctgttcgtcgtgaaggcctactccaagatctctgagtacagacactataaggccgctgccggagtgtctattgcctgcgtgtattgcaagaaggcaggcctcctgattcgctgcatcaattgccagaagaaagcactctacaatctcctgattcgctgtttcaaagccgccagcgtgtacggcgataccctggagaaagtgaaggccctgacagatgtgtccatcgcctgcgtgtacaacgtctatcagttcgcattcaaggacctcaaagctaccctcgaaagaacagaagtgtatggagccgctgcaacactggagaagctcaccaacaccgggctgtataacgccgccgccggacataccatgctgtgcatgtgttgcagaaatgccgaactggacccagtggacctcctctgctataaggctgctgctattagcgattaccggcattactgttataaggcagcaactctccacgacattatcctggagtgtgtgaagagatttcacaatattgcagggcatttcaaagcaaagtttgtggccgcctggacactgaaggcagccgccaaggctgctgcctacgtcctggatctgtacccagagcccgtgaatgctgcccggtttcacaacatcagaggccgctggaagttctattccaagatctccgagttcaaagtgtccgacttcaggtggtatcgctataaggccgctaaactctacagcaagatctctgaataccggaaggcagccgtctactgcaagacagtgctggagtttaaacacaccgacacacctacactgcacgagtacaacgcagcagccttctattccaggattagagaactgcgcttcaaagctgctaaactgaccaacaagggaatctgcgatctgaatgccgctggagctgtctgtgacaagtgcctcaagttcagaaaggctgccgccagcgtctacggagagactctggaacggaaccagaccgagcccgatactagcaactatggccggtactctgtgtacggcaccacactgaagtctctccaggacattgagatcacttgtgtcaaatccgtctatggcaccaccctggagcggaatgcttctctccaggacgtcagcatcgcctgtgtcaagctgccagacctgtgtaccgaactgaatgctgccgcaacattctgctgtaaatgtgacagcacctttaaggcagccggaaaggtctctgagttcaggtggtacagatacaaattctacagcaaagtgagcgagttccgctggaaagctgcttatatgctggacctccagccagagactgtgaatgccctgtcttccgccctggaaatcccttataaatatagcgatatccgcgagctccggcattacaaggccgcagactccgtgtacggagatactctggagaggaacgctgctctgactgatatcgaaatcacttgtgtgtacaaggcaactaccgatctgacaatcgtgtataggtgaggatccgcg

SEQ ID NO: 3117 - DNA, 1683 bp, Human papillomavirus
aaactgcaggccgccaccatgggcatgcaggtgcagatccagagcctgttcctgctcctgctgtgggtgccaggaagcagaggcaggacagaggtgtaccaatttgctttcaggaacgccgcagtgtatggaacaacactggagaagttcaaagccttcgctttcaaggacctgttcgtcgtgaaggcctactccaagatctctgagtacagacactataaggccgctgccggagtgtctattgcctgcgtgtattgcaagaacgcaggcctcctgattcgctgcatcaattgccagaagaacgccgcactctacaatctcctgattcgctgtttcaaagccgccagcgtgtacggcgataccctggagaaagtgaaggccctgacagatgtgtccatcgcctgcgtgtacaacgtctatcagttcgcattcaaggacctcaaagctaccctcgaaagaacagaagtgtatggagccgctgcaacactggagaagctcaccaacaccgggctgtataacgccgccgccggacataccatgctgtgcatgtgttgcagaggagccgaactggacccagtggacctcctctgctataaggctgctgctattagcgattaccggcattactgttataaggcagcaactctccacgacattatcctggagtgtgtgaagagatttcacaatattgcagggcatttcaaagcaaagtttgtggccgcctggacactgaaggcagccgccaaggctgctgcctacgtcctggatctgtacccagagcccgtgaatgctgcccggtttcacaacatcagaggccgctggaagttctattccaagatctccgagttcaaagtgtccgacttcaggtggtatcgctataaggccgctaaactctacagcaagatctctgaataccggaaggcagccgtctactgcaagacagtgctggagtttaaacacaccgacacacctacactgcacgagtacaacgcagcagccttctattccaggattagagaactgcgcttcaaagctgctaaactgaccaacaagggaatctgcgatctgaatgccgctggagctgtctgtgacaagtgcctcaagttcagaaatgctgccgccagcgtctacggagagactctggaacggaaccagaccgagcccgatactagcaactatggccggtactctgtgtacggcaccacactgaagtctctccaggacattgagatcacttgtgtcaaatccgtctatggcaccaccctggagcggaatgcttctctccaggacgtcagcatcgcctgtgtcaagctgccagacctgtgtaccgaactgaatgctgccgcaacattctgctgtaaatgtgacagcacctttaaggcagccggaaaggtctctgagttcaggtggtacagatacaacgccttctacagcaaagtgagcgagttccgctggaaagctgcttatatgctggacctccagccagagactgtgaatgccctgtcttccgccctggaaatcccttataaatatagcgatatccgcgagctccggcattacaaggccgcagactccgtgtacggagatactctggagaggaacgctgctctgactgatatcgaaatcacttgtgtgtacaaggcaactaccgatctgacaatcgtgtataggtgaggatccgcg

SEQ ID NO: 3118 - DNA, 1656 bp, Human papillomavirus
aaactgcaggccgccaccatgggcatgcaggtgcagatccagagcctgttcctgctcctgctgtgggtgccaggaagcagaggctctgtgtacggcaccaccctggaaagaaacgccagcctccaggatatcgaaatcacctgcgtgaaatctgtgtacggggaaactctcgagagaaatgccgctgtgtgcgacaagtgcctgaagttcaggaacgcaaagctgactaacaaaggcatttgtgatctcgggaggtacagcgtctacggcaccacactgaagcagacagagcctgacacctctaattacggggcagctgccgtgtattgcaaaactgtgctggagttcaaacatactgatacacccaccctgcacgagtacaatgctgccgcattctactctcgcattagagagctcaggtttaagtactccaagatctctgagtacagacactataaagtgtacggcaccaccctggagaagttcaaagctgccgccctcctgatccggtgcatcaattgtcagaagaacgctgtgtaccagttcgcattcaaggacctgaagagcgtgtacggagacacactggagaaagtgaaggctgccgccctgtataacctgctgatccggtgttttaaggctgctgccgtctccatcgcctgtgtctactgtaagaacgcagtgagtgacttcagatggtacaggtataagcgcactgaggtgtaccaatttgcattcagaaacgccaccctcgagcgcaccgaagtgtataatgcagccgccttcgcttttaaagatctgtttgtggtcaaggcactgacagacgtgtccatcgcttgtgtctataatgccgcctattctgatattagagaactgaggcactataaagtcagcgagttccgctggtatagatataacgccgcagccctcacagacattgagatcacctgcgtctataaggctgccgccgacagcgtgtacggggacaccctcgagcggaacgcaagcctccaggatgtgagcatcgcttgcgtgaaggctgcctacatgctggatctgcaacccgagactgtgaacgcagctgctactttctgctgcaagtgcgattccacatttaaggcaaccactgacctgactattgtctacagaaacgccgctctctccagcgccctggagatcccatataaagcagccttttattccaaggtgtccgagtttaggtggaaagccgccaagctgcctgacctgtgtactgaactcggacggtttcacaacattgcaggccacttcaaggccgcatatgtcctggacctctaccctgaaccagtcaacaaactgtattctaagatctccgagtacagaaagaggttccataatatccggggacggtggaaggaactggacccagtggacctgctgtgttataaagctcatacaatgctgtgcatgtgttgtaggggcgccacactccacgacattattctggaatgcgtgaaagcagcagctgctaagttcgtggctgcctggacactgaaggcagccgccaaaatctccgattaccgccattactgctataagttttactctaagattagcgagttcaaggctgccaccctcgagaaactgacaaacacaggcctctattgacgcggatccgcg

SEQ ID NO: 3119 - DNA, 1677 bp, Human papillomavirus
aaactgcaggccgccaccatgggcatgcaggtgcagatccagagcctgttcctgctcctgctgtgggtgccaggaagcagaggctctgtgtacggcaccaccctggaaagaaacgccagcctccaggatatcgaaatcacctgcgtgaaatctgtgtacggggaaactctcgagagaaatgccgcagccggcgctgtgtgcgacaagtgcctgaagttcaggaaggcaaagctgactaacaaaggcatttgtgatctcgggaggtacagcgtctacggcaccacactgaagcagacagagcctgacacctctaattacggggcagctgccgtgtattgcaaaactgtgctggagttcaaacatactgatacacccaccctgcacgagtacaatgctgccgcattctactctcgcattagagagctcaggtttaagtactccaagatctctgagtacagacactataaagtgtacggcaccaccctggagaagttcaaagctgccgccggcctcctgatccggtgcatcaattgtcagaagaaagctgtgtaccagttcgcattcaaggacctgaagagcgtgtacggagacacactggagaaagtgaaggctgccgccctgtataacctgctgatccggtgttttaaggctgctgccggagtctccatcgcctgtgtctactgtaagaaagcagtgagtgacttcagatggtacaggtataagcgcactgaggtgtaccaatttgcattcagaaacgccaccctcgagcgcaccgaagtgtataatgcagccgccttcgcttttaaagatctgtttgtggtcaaggcactgacagacgtgtccatcgcttgtgtctataatgccgcctattctgatattagagaactgaggcactatggcaaagtcagcgagttccgctggtatagatataaggccgcagccctcacagacattgagatcacctgcgtctataaggctgccgccgacagcgtgtacggggacaccctcgagcggaacgcaagcctccaggatgtgagcatcgcttgcgtgaaggctgcctacatgctggatctgcaacccgagactgtgaacgcagctgctactttctgctgcaagtgcgattccacatttaaggcaaccactgacctgactattgtctacagaaacgccgctctctccagcgccctggagatcccatataaagcagccttttattccaaggtgtccgagtttaggtggaaagccgccaagctgcctgacctgtgtactgaactcggacggtttcacaacattgcaggccacttcaaggccgcatatgtcctggacctctaccctgaaccagtcaacaaactgtattctaagatctccgagtacagaaagaggttccataatatccggggacggtggaaggaactggacccagtggacctgctgtgttataaagctgggcatacaatgctgtgcatgtgttgtaggaacgccacactccacgacattattctggaatgcgtgaaagcagcagctgctaagttcgtggctgcctggacactgaaggcagccgccaaaatctccgattaccgccattactgctataagttttactctaagattagcgagttcaaggctgccaccctcgagaaactgacaaacacaggcctctattgacgcggatccgcg

SEQ ID NO: 3120 - DNA, 1677 bp, Human papillomavirus
aaactgcaggccgccaccatgggcatgcaggtgcagatccagagcctgttcctgctcctgctgtgggtgccaggaagcagaggctctgtgtacggcaccaccctggaaagaaacgccagcctccaggatatcgaaatcacctgcgtgaaatctgtgtacggggaaactctcgagagaaatgccgcagccggcgctgtgtgcgacaagtgcctgaagttcaggaacgcaaagctgactaacaaaggcatttgtgatctcgggaggtacagcgtctacggcaccacactgaagcagacagagcctgacacctctaattacggggcagctgccgtgtattgcaaaactgtgctggagttcaaacatactgatacacccaccctgcacgagtacaatgctgccgcattctactctcgcattagagagctcaggtttaagtactccaagatctctgagtacagacactataaagtgtacggcaccaccctggagaagttcaaagctgccgccggcctcctgatccggtgcatcaattgtcagaagaacgctgtgtaccagttcgcattcaaggacctgaagagcgtgtacggagacacactggagaaagtgaaggctgccgccctgtataacctgctgatccggtgttttaaggctgctgccggagtctccatcgcctgtgtctactgtaagaacgcagtgagtgacttcagatggtacaggtataagcgcactgaggtgtaccaatttgcattcagaaacgccaccctcgagcgcaccgaagtgtataatgcagccgccttcgcttttaaagatctgtttgtggtcaaggcactgacagacgtgtccatcgcttgtgtctataatgccgcctattctgatattagagaactgaggcactatggcaaagtcagcgagttccgctggtatagatataacgccgcagccctcacagacattgagatcacctgcgtctataaggctgccgccgacagcgtgtacggggacaccctcgagcggaacgcaagcctccaggatgtgagcatcgcttgcgtgaaggctgcctacatgctggatctgcaacccgagactgtgaacgcagctgctactttctgctgcaagtgcgattccacatttaaggcaaccactgacctgactattgtctacagaaacgccgctctctccagcgccctggagatcccatataaagcagccttttattccaaggtgtccgagtttaggtggaaagccgccaagctgcctgacctgtgtactgaactcggacggtttcacaacattgcaggccacttcaaggccgcatatgtcctggacctctaccctgaaccagtcaacaaactgtattctaagatctccgagtacagaaagaggttccataatatccggggacggtggaaggaactggacccagtggacctgctgtgttataaagctgggcatacaatgctgtgcatgtgttgtaggggcgccacactccacgacattattctggaatgcgtgaaagcagcagctgctaagttcgtggctgcctggacactgaaggcagccgccaaaatctccgattaccgccattactgctataagttttactctaagattagcgagttcaaggctgccaccctcgagaaactgacaaacacaggcctctattgacgcggatccgcg

SEQ ID NO: 3121 - protein, 522 aa, Human papillomavirus
RTEVYQFAFRNAAVYGTTLEKFKAFAFKDLFVVKAYSKISEYRHYKAAAVSIACVYCKNALLIRCINCQKNAALYNLLIRCFKAASVYGDTLEKVKALTDVSIACVYNVYQFAFKDLKATLERTEVYGAAATLEKLTNTGLYNAAAHTMLCMCCRGAELDPVDLLCYKAAAISDYRHYCYKAATLHDIILECVKRFHNIAGHFKAKFVAAWTLKAAAKAAAYVLDLYPEPVNAARFHNIRGRWKFYSKISEFKVSDFRWYRYKAAKLYSKISEYRKAAVYCKTVLEFKHTDTPTLHEYNAAAFYSRIRELRFKAAKLTNKGICDLNAVCDKCLKFRNAAASVYGETLERNQTEPDTSNYGRYSVYGTTLKSLQDIEITCVKSVYGTTLERNASLQDVSIACVKLPDLCTELNAAATFCCKCDSTFKAAKVSEFRWYRYNAFYSKVSEFRWKAAYMLDLQPETVNALSSALEIPYKYSDIRELRHYKAADSVYGDTLERNAALTDIEITCVYKATTDLTIVYR

SEQ ID NO: 3122 - protein, 527 aa, Human papillomavirus
RTEVYQFAFRNAAVYGTTLEKFKAFAFKDLFVVKAYSKISEYRHYKAAAGVSIACVYCKKAGLLIRCINCQKKALYNLLIRCFKAASVYGDTLEKVKALTDVSIACVYNVYQFAFKDLKATLERTEVYGAAATLEKLTNTGLYNAAAGHTMLCMCCRNAELDPVDLLCYKAAAISDYRHYCYKAATLHDIILECVKRFHNIAGHFKAKFVAAWTLKAAAKAAAYVLDLYPEPVNAARFHNIRGRWKFYSKISEFKVSDFRWYRYKAAKLYSKISEYRKAAVYCKTVLEFKHTDTPTLHEYNAAAFYSRIRELRFKAAKLTNKGICDLNAAGAVCDKCLKFRKAAASVYGETLERNQTEPDTSNYGRYSVYGTTLKSLQDIEITCVKSVYGTTLERNASLQDVSIACVKLPDLCTELNAAATFCCKCDSTFKAAGKVSEFRWYRYKFYSKVSEFRWKAAYMLDLQPETVNALSSALEIPYKYSDIRELRHYKAADSVYGDTLERNAALTDIEITCVYKATTDLTIVYR

SEQ ID NO: 3123 - protein, 529 aa, Human papillomavirus
RTEVYQFAFRNAAVYGTTLEKFKAFAFKDLFVVKAYSKISEYRHYKAAAGVSIACVYCKNAGLLIRCINCQKNAALYNLLIRCFKAASVYGDTLEKVKALTDVSIACVYNVYQFAFKDLKATLERTEVYGAAATLEKLTNTGLYNAAAGHTMLCMCCRGAELDPVDLLCYKAAAISDYRHYCYKAATLHDIILECVKRFHNIAGHFKAKFVAAWTLKAAAKAAAYVLDLYPEPVNAARFHNIRGRWKFYSKISEFKVSDFRWYRYKAAKLYSKISEYRKAAVYCKTVLEFKHTDTPTLHEYNAAAFYSRIRELRFKAAKLTNKGICDLNAAGAVCDKCLKFRNAAASVYGETLERNQTEPDTSNYGRYSVYGTTLKSLQDIEITCVKSVYGTTLERNASLQDVSIACVKLPDLCTELNAAATFCCKCDSTFKAAGKVSEFRWYRYNAFYSKVSEFRWKAAYMLDLQPETVNALSSALEIPYKYSDIRELRHYKAADSVYGDTLERNAALTDIEITCVYKATTDLTIVYR

SEQ ID NO: 3124 - protein, 519 aa, Human papillomavirus
SVYGTTLERNASLQDIEITCVKSVYGETLERNAAVCDKCLKFRNAKLTNKGICDLGRYSVYGTTLKQTEPDTSNYGAAAVYCKTVLEFKHTDTPTLHEYNAAAFYSRIRELRFKYSKISEYRHYKVYGTTLEKFKAAALLIRCINCQKNAVYQFAFKDLKSVYGDTLEKVKAAALYNLLIRCFKAAAVSIACVYCKNAVSDFRWYRYKRTEVYQFAFRNATLERTEVYNAAAFAFKDLFVVKALTDVSIACVYNAAYSDIRELRHYKVSEFRWYRYNAAALTDIEITCVYKAAADSVYGDTLERNASLQDVSIACVKAAYMLDLQPETVNAAATFCCKCDSTFKATTDLTIVYRNAALSSALEIPYKAAFYSKVSEFRWKAAKLPDLCTELGRFHNIAGHFKAAYVLDLYPEPVNKLYSKISEYRKRFHNIRGRWKELDPVDLLCYKAHTMLCMCCRGATLHDIILECVKAAAAKFVAAWTLKAAAKISDYRHYCYKFYSKISEFKAATLEKLTNTGLY

SEQ ID NO: 3125 - protein, 526 aa, Human papillomavirus
SVYGTTLERNASLQDIEITCVKSVYGETLERNAAAGAVCDKCLKFRKAKLTNKGICDLGRYSVYGTTLKQTEPDTSNYGAAAVYCKTVLEFKHTDTPTLHEYNAAAFYSRIRELRFKYSKISEYRHYKVYGTTLEKFKAAAGLLIRCINCQKKAVYQFAFKDLKSVYGDTLEKVKAAALYNLLIRCFKAAAGVSIACVYCKKAVSDFRWYRYKRTEVYQFAFRNATLERTEVYNAAAFAFKDLFVVKALTDVSIACVYNAAYSDIRELRHYGKVSEFRWYRYKAAALTDIEITCVYKAAADSVYGDTLERNASLQDVSIACVKAAYMLDLQPETVNAAATFCCKCDSTFKATTDLTIVYRNAALSSALEIPYKAAFYSKVSEFRWKAAKLPDLCTELGRFHNIAGHFKAAYVLDLYPEPVNKLYSKISEYRKRFHNIRGRWKELDPVDLLCYKAGHTMLCMCCRNATLHDIILECVKAAAAKFVAAWTLKAAAKISDYRHYCYKFYSKISEFKAATLEKLTNTGLY

SEQ ID NO: 3126 - protein, 526 aa, Human papillomavirus
SVYGTTLERNASLQDIEITCVKSVYGETLERNAAAGAVCDKCLKFRNAKLTNKGICDLGRYSVYGTTLKQTEPDTSNYGAAAVYCKTVLEFKHTDTPTLHEYNAAAFYSRIRELRFKYSKISEYRHYKVYGTTLEKFKAAAGLLIRCINCQKNAVYQFAFKDLKSVYGDTLEKVKAAALYNLLIRCFKAAAGVSIACVYCKNAVSDFRWYRYKRTEVYQFAFRNATLERTEVYNAAAFAFKDLFVVKALTDVSIACVYNAAYSDIRELRHYGKVSEFRWYRYNAAALTDIEITCVYKAAADSVYGDTLERNASLQDVSIACVKAAYMLDLQPETVNAAATFCCKCDSTFKATTDLTIVYRNAALSSALEIPYKAAFYSKVSEFRWKAAKLPDLCTELGRFHNIAGHFKAAYVLDLYPEPVNKLYSKISEYRKRFHNIRGRWKELDPVDLLCYKAGHTMLCMCCRGATLHDIILECVKAAAAKFVAAWTLKAAAKISDYRHYCYKFYSKISEFKAATLEKLTNTGLY

SEQ ID NO: 3127 - protein, 10 aa, Human papillomavirus
TLHDIILECV

SEQ ID NO: 3128 - protein, 10 aa, Human papillomavirus
YMLDLQPETV

SEQ ID NO: 3129 - protein, 10 aa, Human papillomavirus
SLQDIEITCV

SEQ ID NO: 3130 - protein, 9 aa, Human papillomavirus
FAFKDLFVV

SEQ ID NO: 3131 - protein, 10 aa, Human papillomavirus
SVYGDTLEKV

SEQ ID NO: 3132 - protein, 10 aa, Human papillomavirus
YVLDLYPEPV

SEQ ID NO: 3133 - protein, 10 aa, Human papillomavirus
KLTNKGICDL

SEQ ID NO: 3134 - protein, 9 aa, Human papillomavirus
KLPDLCTEL

SEQ ID NO: 3135 - protein, 10 aa, Human papillomavirus
SLQDVSIACV

SEQ ID NO: 3136 - protein, 9 aa, Human papillomavirus
IVYRDGNPY

SEQ ID NO: 3137 - protein, 10 aa, Human papillomavirus
AVCDKCLKFR

SEQ ID NO: 3138 - protein, 10 aa, Human papillomavirus
LLIRCINCQK

SEQ ID NO: 3139 - protein, 10 aa, Human papillomavirus
DSVYGDTLER

SEQ ID NO: 3140 - protein, 9 aa, Human papillomavirus
HTMLCMCCR

SEQ ID NO: 3141 - protein, 10 aa, Human papillomavirus
ATTDLTIVYR

SEQ ID NO: 3142 - protein, 10 aa, Human papillomavirus
KVSEFRWYRY

SEQ ID NO: 3143 - protein, 9 aa, Human papillomavirus
SVYGTTLER

SEQ ID NO: 3144 - protein, 9 aa, Human papillomavirus
VSIACVYCK

SEQ ID NO: 3145 - protein, 10 aa, Human papillomavirus
RTEVYQFAFR

SEQ ID NO: 3146 - protein, 9 aa, Human papillomavirus
SVYGETLER

SEQ ID NO: 3147 - protein, 10 aa, Human papillomavirus
ITDIILECVY

SEQ ID NO: 3148 - protein, 9 aa, Human papillomavirus
ISDYRHYCY

SEQ ID NO: 3149 - protein, 10 aa, Human papillomavirus
HTDTPTLHEY

SEQ ID NO: 3150 - protein, 10 aa, Human papillomavirus
LTDIEITCVY

SEQ ID NO: 3151 - protein, 10 aa, Human papillomavirus
YSDIRELRHY

SEQ ID NO: 3152 - protein, 11 aa, Human papillomavirus
TLEKLTNTGLY

SEQ ID NO: 3153 - protein, 9 aa, Human papillomavirus
LSSALEIPY

SEQ ID NO: 3154 - protein, 8 aa, Human papillomavirus
FTDLTIVY

SEQ ID NO: 3155 - protein, 9 aa, Human papillomavirus
QTEPDTSNY

SEQ ID NO: 3156 - protein, 10 aa, Human papillomavirus
LTDVSIACVY

SEQ ID NO: 3157 - protein, 9 aa, Human papillomavirus
ATLERTEVY

SEQ ID NO: 3158 - protein, 10 aa, Human papillomavirus
ELDPVDLLCY

SEQ ID NO: 3159 - protein, 9 aa, Human papillomavirus
RFHNIRGRW

SEQ ID NO: 3160 - protein, 9 aa, Human papillomavirus
KFYSKISEF

SEQ ID NO: 3161 - protein, 10 aa, Human papillomavirus
TFCCKCDSTF

SEQ ID NO: 3162 - protein, 9 aa, Human papillomavirus
RFHNIAGHF

SEQ ID NO: 3163 - protein, 9 aa, Human papillomavirus
VYCKTVLEF

SEQ ID NO: 3164 - protein, 9 aa, Human papillomavirus
LYNLLIRCF

SEQ ID NO: 3165 - protein, 10 aa, Human papillomavirus
FYSKVSEFRW

SEQ ID NO: 3166 - protein, 9 aa, Human papillomavirus
RYSVYGTTL

SEQ ID NO: 3167 - protein, 9 aa, Human papillomavirus
VYGTTLEKF

SEQ ID NO: 3168 - protein, 9 aa, Human papillomavirus
VYQFAFKDL

SEQ ID NO: 3169 - protein, 10 aa, Human papillomavirus
FYSRIRELRF

SEQ ID NO: 3170 - protein, 10 aa, Human papillomavirus
TLHDIILECV

SEQ ID NO: 3171 - protein, 10 aa, Human papillomavirus
YMLDLQPETV

SEQ ID NO: 3172 - protein, 10 aa, Human papillomavirus
SLQDIEITCV

SEQ ID NO: 3173 - protein, 9 aa, Human papillomavirus
FAFKDLFVV

SEQ ID NO: 3174 - protein, 10 aa, Human papillomavirus
SVYGDTLEKV

SEQ ID NO: 3175 - protein, 10 aa, Human papillomavirus
YVLDLYPEPV

SEQ ID NO: 3176 - protein, 10 aa, Human papillomavirus
KLTNKGICDL

SEQ ID NO: 3177 - protein, 9 aa, Human papillomavirus
KLPDLCTEL

SEQ ID NO: 3178 - protein, 10 aa, Human papillomavirus
SLQDVSIACV

SEQ ID NO: 3179 - protein, 10 aa, Human papillomavirus
KLYSKISEYR

SEQ ID NO: 3180 - protein, 10 aa, Human papillomavirus
AVCDKCLKFR

SEQ ID NO: 3181 - protein, 10 aa, Human papillomavirus
LLIRCINCQK

SEQ ID NO: 3182 - protein, 10 aa, Human papillomavirus
DSVYGDTLER

SEQ ID NO: 3183 - protein, 9 aa, Human papillomavirus
HTMLCMCCR

SEQ ID NO: 3184 - protein, 10 aa, Human papillomavirus
ATTDLTIVYR

SEQ ID NO: 3185 - protein, 10 aa, Human papillomavirus
KVSEFRWYRY

SEQ ID NO: 3186 - protein, 9 aa, Human papillomavirus
SVYGTTLER

SEQ ID NO: 3187 - protein, 9 aa, Human papillomavirus
VSIACVYCK

SEQ ID NO: 3188 - protein, 10 aa, Human papillomavirus
RTEVYQFAFR

SEQ ID NO: 3189 - protein, 9 aa, Human papillomavirus
SVYGETLER

SEQ ID NO: 3190 - protein, 10 aa, Human papillomavirus
YSKISEYRHY

SEQ ID NO: 3191 - protein, 9 aa, Human papillomavirus
ISDYRHYCY

SEQ ID NO: 3192 - protein, 10 aa, Human papillomavirus
HTDTPTLHEY

SEQ ID NO: 3193 - protein, 10 aa, Human papillomavirus
LTDIEITCVY

SEQ ID NO: 3194 - protein, 10 aa, Human papillomavirus
YSDIRELRHY

SEQ ID NO: 3195 - protein, 11 aa, Human papillomavirus
TLEKLTNTGLY

SEQ ID NO: 3196 - protein, 9 aa, Human papillomavirus
LSSALEIPY

SEQ ID NO: 3197 - protein, 9 aa, Human papillomavirus
VSDFRWYRY

SEQ ID NO: 3198 - protein, 9 aa, Human papillomavirus
QTEPDTSNY

SEQ ID NO: 3199 - protein, 10 aa, Human papillomavirus
LTDVSIACVY

SEQ ID NO: 3200 - protein, 9 aa, Human papillomavirus
ATLERTEVY

SEQ ID NO: 3201 - protein, 10 aa, Human papillomavirus
ELDPVDLLCY

SEQ ID NO: 3202 - protein, 9 aa, Human papillomavirus
RFHNIRGRW

SEQ ID NO: 3203 - protein, 9 aa, Human papillomavirus
KFYSKISEF

SEQ ID NO: 3204 - protein, 10 aa, Human papillomavirus
TFCCKCDSTF

SEQ ID NO: 3205 - protein, 9 aa, Human papillomavirus
RFHNIAGHF

SEQ ID NO: 3206 - protein, 9 aa, Human papillomavirus
VYCKTVLEF

SEQ ID NO: 3207 - protein, 9 aa, Human papillomavirus
LYNLLIRCF

SEQ ID NO: 3208 - protein, 10 aa, Human papillomavirus
FYSKVSEFRW

SEQ ID NO: 3209 - protein, 9 aa, Human papillomavirus
RYSVYGTTL

SEQ ID NO: 3210 - protein, 9 aa, Human papillomavirus
VYGTTLEKF

SEQ ID NO: 3211 - protein, 9 aa, Human papillomavirus
VYQFAFKDL

SEQ ID NO: 3212 - protein, 10 aa, Human papillomavirus
FYSRIRELRF

SEQ ID NO: 3213 - protein, 10 aa, Human papillomavirus
TLHDIILECV

SEQ ID NO: 3214 - protein, 10 aa, Human papillomavirus
YMLDLQPETV

SEQ ID NO: 3215 - protein, 8 aa, Human papillomavirus
TLGIVCPV

SEQ ID NO: 3216 - protein, 10 aa, Human papillomavirus
SLQDIEITCV

SEQ ID NO: 3217 - protein, 10 aa, Human papillomavirus
KLTNTGLYNV

SEQ ID NO: 3218 - protein, 10 aa, Human papillomavirus
SVYGDTLEKV

SEQ ID NO: 3219 - protein, 10 aa, Human papillomavirus
YVLDLYPEPV

SEQ ID NO: 3220 - protein, 10 aa, Human papillomavirus
KLTNKGICDL

SEQ ID NO: 3221 - protein, 9 aa, Human papillomavirus
KLPDLCTEL

SEQ ID NO: 3222 - protein, 10 aa, Human papillomavirus
SLQDVSIACV

SEQ ID NO: 3223 - protein, 10 aa, Human papillomavirus
IVYRDCIAYV

SEQ ID NO: 3224 - protein, 10 aa, Human papillomavirus
KLYSKISEYR

SEQ ID NO: 3225 - protein, 10 aa, Human papillomavirus
AVCDKCLKFR

SEQ ID NO: 3226 - protein, 10 aa, Human papillomavirus
LLIRCINCQK

SEQ ID NO: 3227 - protein, 10 aa, Human papillomavirus
FVVYRDSIPK

SEQ ID NO: 3228 - protein, 10 aa, Human papillomavirus
DSVYGDTLER

SEQ ID NO: 3229 - protein, 9 aa, Human papillomavirus
HTMLCMCCR

SEQ ID NO: 3230 - protein, 10 aa, Human papillomavirus
WTGRCIACWK

SEQ ID NO: 3231 - protein, 10 aa, Human papillomavirus
KVSEFRWYRY

SEQ ID NO: 3232 - protein, 9 aa, Human papillomavirus
SVYGTTLER

SEQ ID NO: 3233 - protein, 9 aa, Human papillomavirus
IVYRDCIAY

SEQ ID NO: 3234 - protein, 10 aa, Human papillomavirus
RTEVYQFAFR

SEQ ID NO: 3235 - protein, 9 aa, Human papillomavirus
SVYGETLER

SEQ ID NO: 3236 - protein, 10 aa, Human papillomavirus
YSKISEYRHY

SEQ ID NO: 3237 - protein, 9 aa, Human papillomavirus
ISDYRHYCY

SEQ ID NO: 3238 - protein, 10 aa, Human papillomavirus
HTDTPTLHEY

SEQ ID NO: 3239 - protein, 10 aa, Human papillomavirus
LTDIEITCVY

SEQ ID NO: 3240 - protein, 10 aa, Human papillomavirus
YSDIRELRHY

SEQ ID NO: 3241 - protein, 11 aa, Human papillomavirus
TLEKLTNTGLY

SEQ ID NO: 3242 - protein, 9 aa, Human papillomavirus
LSSALEIPY

SEQ ID NO: 3243 - protein, 9 aa, Human papillomavirus
VSDFRWYRY

SEQ ID NO: 3244 - protein, 9 aa, Human papillomavirus
QTEPDTSNY

SEQ ID NO: 3245 - protein, 10 aa, Human papillomavirus
LTDVSIACVY

SEQ ID NO: 3246 - protein, 9 aa, Human papillomavirus
ATLERTEVY

SEQ ID NO: 3247 - protein, 10 aa, Human papillomavirus
ELDPVDLLCY

SEQ ID NO: 3248 - protein, 9 aa, Human papillomavirus
RFHNIRGRW

SEQ ID NO: 3249 - protein, 9 aa, Human papillomavirus
KFYSKISEF

SEQ ID NO: 3250 - protein, 10 aa, Human papillomavirus
TFCCKCDSTF

SEQ ID NO: 3251 - protein, 9 aa, Human papillomavirus
RFHNIAGHF

SEQ ID NO: 3252 - protein, 9 aa, Human papillomavirus
VYCKTVLEF

SEQ ID NO: 3253 - protein, 9 aa, Human papillomavirus
LYNLLIRCF

SEQ ID NO: 3254 - protein, 10 aa, Human papillomavirus
FYSKVSEFRW

SEQ ID NO: 3255 - protein, 9 aa, Human papillomavirus
RYSVYGTTL

SEQ ID NO: 3256 - protein, 9 aa, Human papillomavirus
VYGTTLEKF

SEQ ID NO: 3257 - protein, 9 aa, Human papillomavirus
VYQFAFKDL

SEQ ID NO: 3258 - protein, 10 aa, Human papillomavirus
FYSRIRELRF

SEQ ID NO: 3259 - protein, 10 aa, Human papillomavirus
TLHDIILECV

SEQ ID NO: 3260 - protein, 10 aa, Human papillomavirus
YMLDLQPETV

SEQ ID NO: 3261 - protein, 8 aa, Human papillomavirus
TLGIVCPV

SEQ ID NO: 3262 - protein, 10 aa, Human papillomavirus
SLQDIEITCV

SEQ ID NO: 3263 - protein, 10 aa, Human papillomavirus
KLTNTGLYNV

SEQ ID NO: 3264 - protein, 10 aa, Human papillomavirus
SVYGDTLEKV

SEQ ID NO: 3265 - protein, 10 aa, Human papillomavirus
YVLDLYPEPV

SEQ ID NO: 3266 - protein, 10 aa, Human papillomavirus
KLTNKGICDL

SEQ ID NO: 3267 - protein, 9 aa, Human papillomavirus
KLPDLCTEL

SEQ ID NO: 3268 - protein, 10 aa, Human papillomavirus
SLQDVSIACV

SEQ ID NO: 3269 - protein, 10 aa, Human papillomavirus
IVYRDCIAYV

SEQ ID NO: 3270 - protein, 10 aa, Human papillomavirus
KLYSKISEYR

SEQ ID NO: 3271 - protein, 10 aa, Human papillomavirus
AVCDKCLKFR

SEQ ID NO: 3272 - protein, 10 aa, Human papillomavirus
LLIRCINCQK

SEQ ID NO: 3273 - protein, 10 aa, Human papillomavirus
FVVYRDSIPK

SEQ ID NO: 3274 - protein, 10 aa, Human papillomavirus
DSVYGDTLER

SEQ ID NO: 3275 - protein, 9 aa, Human papillomavirus
HTMLCMCCR

SEQ ID NO: 3276 - protein, 10 aa, Human papillomavirus
WTGRCIACWK

SEQ ID NO: 3277 - protein, 10 aa, Human papillomavirus
KVSEFRWYRY

SEQ ID NO: 3278 - protein, 9 aa, Human papillomavirus
SVYGTTLER

SEQ ID NO: 3279 - protein, 9 aa, Human papillomavirus
IVYRDCIAY

SEQ ID NO: 3280 - protein, 10 aa, Human papillomavirus
RTEVYQFAFR

SEQ ID NO: 3281 - protein, 9 aa, Human papillomavirus
SVYGETLER

SEQ ID NO: 3282 - protein, 10 aa, Human papillomavirus
YSKISEYRHY

SEQ ID NO: 3283 - protein, 9 aa, Human papillomavirus
ISDYRHYCY

SEQ ID NO: 3284 - protein, 10 aa, Human papillomavirus
HTDTPTLHEY

SEQ ID NO: 3285 - protein, 10 aa, Human papillomavirus
LTDIEITCVY

SEQ ID NO: 3286 - protein, 10 aa, Human papillomavirus
YSDIRELRHY

SEQ ID NO: 3287 - protein, 11 aa, Human papillomavirus
TLEKLTNTGLY

SEQ ID NO: 3288 - protein, 9 aa, Human papillomavirus
LSSALEIPY

SEQ ID NO: 3289 - protein, 9 aa, Human papillomavirus
VSDFRWYRY

SEQ ID NO: 3290 - protein, 9 aa, Human papillomavirus
QTEPDTSNY

SEQ ID NO: 3291 - protein, 10 aa, Human papillomavirus
LTDVSIACVY

SEQ ID NO: 3292 - protein, 9 aa, Human papillomavirus
ATLERTEVY

SEQ ID NO: 3293 - protein, 10 aa, Human papillomavirus
ELDPVDLLCY

SEQ ID NO: 3294 - protein, 9 aa, Human papillomavirus
RFHNIRGRW

SEQ ID NO: 3295 - protein, 9 aa, Human papillomavirus
KFYSKISEF

SEQ ID NO: 3296 - protein, 10 aa, Human papillomavirus
TFCCKCDSTF

SEQ ID NO: 3297 - protein, 9 aa, Human papillomavirus
RFHNIAGHF

SEQ ID NO: 3298 - protein, 9 aa, Human papillomavirus
VYCKTVLEF

SEQ ID NO: 3299 - protein, 9 aa, Human papillomavirus
LYNLLIRCF

SEQ ID NO: 3300 - protein, 10 aa, Human papillomavirus
FYSKVSEFRW

SEQ ID NO: 3301 - protein, 9 aa, Human papillomavirus
RYSVYGTTL

SEQ ID NO: 3302 - protein, 9 aa, Human papillomavirus
VYGTTLEKL

SEQ ID NO: 3303 - protein, 9 aa, Human papillomavirus
VYQFAFKDL

SEQ ID NO: 3304 - protein, 10 aa, Human papillomavirus
FYSRIRELRF

SEQ ID NO: 3305 - protein, 10 aa, Human papillomavirus
TLHDIILECV

SEQ ID NO: 3306 - protein, 8 aa, Human papillomavirus
TLGIVCPV

SEQ ID NO: 3307 - protein, 10 aa, Human papillomavirus
YMLDLQPETV

SEQ ID NO: 3308 - protein, 10 aa, Human papillomavirus
SLQDIEITCV

SEQ ID NO: 3309 - protein, 10 aa, Human papillomavirus
KLTNTGLYNV

SEQ ID NO: 3310 - protein, 10 aa, Human papillomavirus
SVYGDTLEKV

SEQ ID NO: 3311 - protein, 10 aa, Human papillomavirus
YVLDLYPEPV

SEQ ID NO: 3312 - protein, 10 aa, Human papillomavirus
KLTNKGICDL

SEQ ID NO: 3313 - protein, 9 aa, Human papillomavirus
KLPDLCTEL

SEQ ID NO: 3314 - protein, 10 aa, Human papillomavirus
SLQDVSIACV

SEQ ID NO: 3315 - protein, 10 aa, Human papillomavirus
IVYRDCIAYV

SEQ ID NO: 3316 - protein, 10 aa, Human papillomavirus
KLYSKISEYR

SEQ ID NO: 3317 - protein, 10 aa, Human papillomavirus
AVCDKCLKFR

SEQ ID NO: 3318 - protein, 10 aa, Human papillomavirus
LLIRCINCQK

SEQ ID NO: 3319 - protein, 10 aa, Human papillomavirus
FVVYRDSIPK

SEQ ID NO: 3320 - protein, 10 aa, Human papillomavirus
DSVYGDTLER

SEQ ID NO: 3321 - protein, 9 aa, Human papillomavirus
HTMLCMCCR

SEQ ID NO: 3322 - protein, 10 aa, Human papillomavirus
KVSEFRWYRY

SEQ ID NO: 3323 - protein, 9 aa, Human papillomavirus
SVYGTTLER

SEQ ID NO: 3324 - protein, 10 aa, Human papillomavirus
WTGRCIACWK

SEQ ID NO: 3325 - protein, 10 aa, Human papillomavirus
RTEVYQFAFR

SEQ ID NO: 3326 - protein, 9 aa, Human papillomavirus
IVYRDCIAY

SEQ ID NO: 3327 - protein, 9 aa, Human papillomavirus
SVYGETLER

SEQ ID NO: 3328 - protein, 10 aa, Human papillomavirus
YSKISEYRHY

SEQ ID NO: 3329 - protein, 9 aa, Human papillomavirus
ISDYRHYCY

SEQ ID NO: 3330 - protein, 10 aa, Human papillomavirus
HTDTPTLHEY

SEQ ID NO: 3331 - protein, 10 aa, Human papillomavirus
LTDIEITCVY

SEQ ID NO: 3332 - protein, 10 aa, Human papillomavirus
YSDIRELRHY

SEQ ID NO: 3333 - protein, 11 aa, Human papillomavirus
TLEKLTNTGLY

SEQ ID NO: 3334 - protein, 9 aa, Human papillomavirus
LSSALEIPY

SEQ ID NO: 3335 - protein, 9 aa, Human papillomavirus
VSDFRWYRY

SEQ ID NO: 3336 - protein, 9 aa, Human papillomavirus
QTEPDTSNY

SEQ ID NO: 3337 - protein, 10 aa, Human papillomavirus
LTDVSIACVY

SEQ ID NO: 3338 - protein, 9 aa, Human papillomavirus
ATLERTEVY

SEQ ID NO: 3339 - protein, 10 aa, Human papillomavirus
ELDPVDLLCY

SEQ ID NO: 3340 - protein, 9 aa, Human papillomavirus
RFHNIRGRW

SEQ ID NO: 3341 - protein, 9 aa, Human papillomavirus
KFYSKISEF

SEQ ID NO: 3342 - protein, 10 aa, Human papillomavirus
TFCCKCDSTF

SEQ ID NO: 3343 - protein, 9 aa, Human papillomavirus
RFHNIAGHF

SEQ ID NO: 3344 - protein, 9 aa, Human papillomavirus
VYCKTVLEF

SEQ ID NO: 3345 - protein, 9 aa, Human papillomavirus
LYNLLIRCF

SEQ ID NO: 3346 - protein, 10 aa, Human papillomavirus
FYSKVSEFRW

SEQ ID NO: 3347 - protein, 9 aa, Human papillomavirus
RYSVYGTTL

SEQ ID NO: 3348 - protein, 9 aa, Human papillomavirus
VYGTTLEKF

SEQ ID NO: 3349 - protein, 9 aa, Human papillomavirus
VYQFAFKDL

SEQ ID NO: 3350 - protein, 10 aa, Human papillomavirus
FYSRIRELRF

SEQ ID NO: 3351 - DNA, 1764 bp, Human papillomavirus
aaactgcaggccgccaccatgggcatgcaggtgcagatccagagcctgttcctgctcctgctgtgggtgccaggaagcagaggcaccctgcatgatattattctggagtgcgtcaaacacacagacacacccaccctgcacgagtataacgtctctgactttaggtggtacaggtacaaaagatttcacaatatcagaggaaggtggaagttctattcccgcattagggaactgaggttcaaggctgcccgcactgaggtctatcaatttgcatttcggaatgcctctgtgtacggcgacaccctggagaaggtgaaagccgccgccctctacaatctgctcatccgctgtttcaaagctgccgcaattgtgtaccgggattgcatcgcttacgtgaaggattccgtgtatggagacaccctcgagcgcggctacatgctggatctccagccagagacagtgaacgccagcgtgtacggagagactctggaacggaataaggtgtctgagtttagatggtataggtacaagaggtactccgtgtacggcacgacgctcaaagccgcagccgcagtctgtgacaaatgcctcaagtttagaaaggctaagctcactaacaagggcatctgcgacctcaataccttttgttgtaagtgcgacagcacctttaaggccgcctacagcgatattcgcgagctgcggcactacaaggccgccgccctgaccgacgtgtctattgcctgcgtctacggggccgcatatgtgctcgacctctaccccgagcctgtcaacgcaatcgtgtatcgcgattgtatcgcatacaatgctgccgcccacaccatgctgtgcatgtgttgcagaaatgcagcggccttctactccaaggtctctgaattcagatggaaggccgctaagctgtattctaagatctccgagtatcgcaagttctattctaaaatcagcgagttcaaagctgccacactgggcattgtgtgccccgtgaacgccgctctgacagatatcgagatcacctgcgtgtacaaacagaccgagcccgataccagcaactacggagccgcctccctccaagacattgaaatcacttgtgtgaagctccccgatctctgtacagaactgaacgctgccgcagccaccctggagcggaccgaggtgtacggggccgccgcactcctgatcaggtgtattaactgtcagaagaaggccgtctacggcaccaccctggagaaatttaaggccgccgctagcgtctatgggacgactctggaaaggggaagattccataacatcgccgggcatttcaaatattccaagatctccgaataccggcactacaaggcagcgaccctggagaaactgaccaacaccgggctgtatggagcggcagaactggacccggtggacctgctgtgttataagctgagcagcgccctggagattccatataaggcggctgccgtgtactgcaaaaccgtcctggagttcaaagctgcgagcctccaggacgtctccattgcctgtgtgaaattcgtggtctaccgggactctatccctaagaacatcagcgattaccggcattactgctataagtggactggcagatgcatcgcctgttggaagaaagctaagttcgtcgctgcatggactctcaaagccgcggccaaggcagccgctgtgtatcagtttgcgttcaaagatctgaagaagctgacgaatacaggcctctataacgtgtgaggatccgcg

SEQ ID NO: 3352 - DNA, 1773 bp, Human papillomavirus
aaactgcaggccgccaccatgggcatgcaggtgcagatccagagcctgttcctgctcctgctgtgggtgccaggaagcagaggctatatgctcgatctccagcctgagaccgtgggagccgccgcaaaactcaccaacaaaggaatctgcgacctgaacgctgtctgtgataagtgcctgaaattcaggaaggcagccctgaccgatgtctccattgcttgcgtctacaatgccgctcggtatagcgtgtatggaaccacgttgaaggccgcggccacgttctgctgtaagtgtgactctacctttaaggccgcaaaagtgagcgagttccggtggtaccgctacaaatacagcgatattagagagctgcgccactataaggccgcagcaagcgtgtacggcgagactctcgaacggaatgcaaccctccacgacatcattctggaatgcgtgtccgtctatggggacacactggaaaaggtcaagcacactgataccccgacactgcatgagtacaacgctgccgcagactctgtgtatggggacacactggagaggaatgcagtctctgattttcgctggtacaggtacaaggccgccgccattgtctaccgggattgtatcgcttacgtgaaaaggaccgaggtgtaccagttcgcattcagaaacgccttttatagcagaatcagagagctgcggttcaaactgtataatctcctgattcggtgcttcaaagccgctgcccgctttcacaacattaggggcagatggaaggcgaaattcgtggctgcctggaccctcaaggccgccgcgaagctgaccaacacaggactgtataatgtgaacgcttggactggccgctgtatcgcctgttggaagaagtccctccaggacgtgagcatcgcctgtgtgaaggctgtgtatcagttcgcctttaaagatctcaaggaactcgaccccgtcgatctgctgtgttataaggctgccgccattagcgactataggcactactgctacaaagcggcggctgtgtattgcaagaccgtcctcgagtttaaactgtcctccgctctggaaatcccctacaaagctgcgtttgtcgtctatagagacagcattcctaaaggaaccctcggaatcgtgtgtccagtgaatgccgccgcacataccatgctgtgcatgtgttgccgcggggcagccgccatcgtgtatagggactgcatcgcttacggcgccgcttacgtgctcgatctgtaccccgaacccgtgaaccagacggagccagacaccagcaactacaatgcagcagctttctattctaaggtctctgagtttaggtggaaggccgcgaagttctactccaagatctctgagtttaagctgtactccaaaatctccgaataccggaaggcagccctgaccgatatcgaaatcacttgcgtctacaaggccgcctctctccaagacattgaaatcacctgcgtgaaatctgtgtacggcaccaccctcgagagaggcgccgccactatcgagaagctcacaaacacaggcctgtacaacgccgccgccgccactctggaacgcactgaggtgtacaatgcaagattccataacatcgcgggacacttcaaagccgcagccctgctgatccggtgtattaattgtcagaagaagtacagcaagatttccgagtataggcattacaaagtgtatgggacaaccctggagaagttcaagctgcccgacctgtgcacggaactgtgaggatccgcg

SEQ ID NO: 3353 - DNA, 1764 bp, Human papillomavirus
aaactgcaggccgccaccatgggcatgcaggtgcagatccagagcctgttcctgctcctgctgtgggtgccaggaagcagaggcaccctgcatgatattattctggagtgcgtcaaacacacagacacacccaccctgcacgagtataacgtctctgactttaggtggtacaggtacaaaagatttcacaatatcagaggaaggtggaagttctattcccgcattagggaactgaggttcaaggctgcccgcactgaggtctatcaatttgcatttcggaatgcctctgtgtacggcgacaccctggagaaggtgaaagccgccgccctctacaatctgctcatccgctgtttcaaagctgccgcaattgtgtaccgggattgcatcgcttacgtgaaggattccgtgtatggagacaccctcgagcgcggctacatgctggatctccagccagagacagtgaacgccagcgtgtacggagagactctggaacggaataaggtgtctgagtttagatggtataggtacaagaggtactccgtgtacggcacgacgctcaaagccgcagccgcagtctgtgacaaatgcctcaagtttagaaaggctaagctcactaacaagggcatctgcgacctcaataccttttgttgtaagtgcgacagcacctttaaggccgcctacagcgatattcgcgagctgcggcactacaaggccgccgccctgaccgacgtgtctattgcctgcgtctacggggccgcatatgtgctcgacctctaccccgagcctgtcaacgcaatcgtgtatcgcgattgtatcgcatacaatgctgccgcccacaccatgctgtgcatgtgttgcagaaatgcagcggccttctactccaaggtctctgaattcagatggaaggccgctaagctgtattctaagatctccgagtatcgcaagttctattctaaaatcagcgagttcaaagctgccacactgggcattgtgtgccccgtgaacgccgctctgacagatatcgagatcacctgcgtgtacaaacagaccgagcccgataccagcaactacggagccgcctccctccaagacattgaaatcacttgtgtgaagctccccgatctctgtacagaactgaacgctgccgcagccaccctggagcggaccgaggtgtacggggccgccgcactcctgatcaggtgtattaactgtcagaagaaggccgtctacggcaccaccctggagaaattgaaggccgccgctagcgtctatgggacgactctggaaaggggaagattccataacatcgccgggcatttcaaatattccaagatctccgaataccggcactacaaggcagcgaccctggagaaactgaccaacaccgggctgtatggagcggcagaactggacccggtggacctgctgtgttataagctgagcagcgccctggagattccatataaggcggctgccgtgtactgcaaaaccgtcctggagttcaaagctgcgagcctccaggacgtctccattgcctgtgtgaaattcgtggtctaccgggactctatccctaagaacatcagcgattaccggcattactgctataagtggactggcagatgcatcgcctgttggaagaaagctaagttcgtcgctgcatggactctcaaagccgcggccaaggcagccgctgtgtatcagtttgcgttcaaagatctgaagaagctgacgaatacaggcctctataacgtgggagcggccgcc

SEQ ID NO: 3354 - protein, 578 aa, Human papillomavirus
MGMQVQIQSLFLLLLWVPGSRGTLHDIILECVKHTDTPTLHEYNVSDFRWYRYKRFHNIRGRWKFYSRIRELRFKAARTEVYQFAFRNASVYGDTLEKVKAAALYNLLIRCFKAAAIVYRDCIAYVKDSVYGDTLERGYMLDLQPETVNASVYGETLERNKVSEFRWYRYKRYSVYGTTLKAAAAVCDKCLKFRKAKLTNKGICDLNTFCCKCDSTFKAAYSDIRELRHYKAAALTDVSIACVYGAAYVLDLYPEPVNAIVYRDCIAYNAAAHTMLCMCCRNAAAFYSKVSEFRWKAAKLYSKISEYRKFYSKISEFKAATLGIVCPVNAALTDIEITCVYKQTEPDTSNYGAASLQDIEITCVKLPDLCTELNAAAATLERTEVYGAAALLIRCINCQKKAVYGTTLEKFKAAASVYGTTLERGRFHNIAGHFKYSKISEYRHYKAATLEKLTNTGLYGAAELDPVDLLCYKLSSALEIPYKAAAVYCKTVLEFKAASLQDVSIACVKFVVYRDSIPKNISDYRHYCYKWTGRCIACWKKAKFVAAWTLKAAAKAAAVYQFAFKDLKKLTNTGLYNV

SEQ ID NO: 3355 - protein, 581 aa, Human papillomavirus
MGMQVQIQSLFLLLLWVPGSRGYMLDLQPETVGAAAKLTNKGICDLNAVCDKCLKFRKAALTDVSIACVYNAARYSVYGTTLKAAATFCCKCDSTFKAAKVSEFRWYRYKYSDIRELRHYKAAASVYGETLERNATLHDIILECVSVYGDTLEKVKHTDTPTLHEYNAAADSVYGDTLERNAVSDFRWYRYKAAAIVYRDCIAYVKRTEVYQFAFRNAFYSRIRELRFKLYNLLIRCFKAAARFHNIRGRWKAKFVAAWTLKAAAKLTNTGLYNVNAWTGRCIACWKKSLQDVSIACVKAVYQFAFKDLKELDPVDLLCYKAAAISDYRHYCYKAAAVYCKTVLEFKLSSALEIPYKAAFVVYRDSIPKGTLGIVCPVNAAAHTMLCMCCRGAAAIVYRDCIAYGAAYVLDLYPEPVNQTEPDTSNYNAAAFYSKVSEFRWKAAKFYSKISEFKLYSKISEYRKAALTDIEITCVYKAASLQDIEITCVKSVYGTTLERGAATIEKLTNTGLYNAAAATLERTEVYNARFHNIAGHFKAAALLIRCINCQKKYSKISEYRHYKVYGTTLEKFKLPDLCTEL

SEQ ID NO: 3356 - protein, 578 aa, Human papillomavirus
MGMQVQIQSLFLLLLWVPGSRGTLHDIILECVKHTDTPTLHEYNVSDFRWYRYKRFHNIRGRWKFYSRIRELRFKAARTEVYQFAFRNASVYGDTLEKVKAAALYNLLIRCFKAAAIVYRDCIAYVKDSVYGDTLERGYMLDLQPETVNASVYGETLERNKVSEFRWYRYKRYSVYGTTLKAAAAVCDKCLKFRKAKLTNKGICDLNTFCCKCDSTFKAAYSDIRELRHYKAAALTDVSIACVYGAAYVLDLYPEPVNAIVYRDCIAYNAAAHTMLCMCCRNAAAFYSKVSEFRWKAAKLYSKISEYRKFYSKISEFKAATLGIVCPVNAALTDIEITCVYKQTEPDTSNYGAASLQDIEITCVKLPDLCTELNAAAATLERTEVYGAAALLIRCINCQKKAVYGTTLEKLKAAASVYGTTLERGRFHNIAGHFKYSKISEYRHYKAATLEKLTNTGLYGAAELDPVDLLCYKLSSALEIPYKAAAVYCKTVLEFKAASLQDVSIACVKFVVYRDSIPKNISDYRHYCYKWTGRCIACWKKAKFVAAWTLKAAAKAAAVYQFAFKDLKKLTNTGLYNV

SEQ ID NO: 3357 - protein, 9 aa, Human papillomavirus
LLQQYCLYL

SEQ ID NO: 3358 - protein, 9 aa, Human papillomavirus
VAWDSVYYM

SEQ ID NO: 3359 - protein, 9 aa, Human papillomavirus
AIFGVNPTV

SEQ ID NO: 3360 - protein, 9 aa, Human papillomavirus
LTYDSEWQR

SEQ ID NO: 3361 - protein, 9 aa, Human papillomavirus
STVSVGTAK

SEQ ID NO: 3362 - protein, 9 aa, Human papillomavirus
VTYNSEVQR

SEQ ID NO: 3363 - protein, 9 aa, Human papillomavirus
QVDYYGLYY

SEQ ID NO: 3364 - protein, 10 aa, Human papillomavirus
ATCVSHRGLY

SEQ ID NO: 3365 - protein, 9 aa, Human papillomavirus
LQDKILDHY

SEQ ID NO: 3366 - protein, 9 aa, Human papillomavirus
YYMTDAGTW

SEQ ID NO: 3367 - protein, 10 aa, Human papillomavirus
PYLHSRLVVF

SEQ ID NO: 3368 - protein, 10 aa, Human papillomavirus
FLQGSVICFV

SEQ ID NO: 3369 - protein, 9 aa, Human papillomavirus
KLLEKLLCI

SEQ ID NO: 3370 - protein, 9 aa, Human papillomavirus
TLYAHIQCL

SEQ ID NO: 3371 - protein, 10 aa, Human papillomavirus
STAAALYWYK

SEQ ID NO: 3372 - protein, 9 aa, Human papillomavirus
NTMHYTNWK

SEQ ID NO: 3373 - protein, 9 aa, Human papillomavirus
AVMCRHYKR

SEQ ID NO: 3374 - protein, 9 aa, Human papillomavirus
KSAIVTLTY

SEQ ID NO: 3375 - protein, 9 aa, Human papillomavirus
VMDDSEIAY

SEQ ID NO: 3376 - protein, 9 aa, Human papillomavirus
HYTNWTHIY

SEQ ID NO: 3377 - protein, 9 aa, Human papillomavirus
GYNTFYIEF

SEQ ID NO: 3378 - protein, 10 aa, Human papillomavirus
VFTFPNPFPF

SEQ ID NO: 3379 - protein, 9 aa, Human papillomavirus
ILYAHIQCL

SEQ ID NO: 3380 - protein, 9 aa, Human papillomavirus
YTNWKFIYL

SEQ ID NO: 3381 - protein, 10 aa, Human papillomavirus
YVVWDSIYYI

SEQ ID NO: 3382 - protein, 10 aa, Human papillomavirus
QVVPAYNISK

SEQ ID NO: 3383 - protein, 9 aa, Human papillomavirus
ISFAGIVTK

SEQ ID NO: 3384 - protein, 10 aa, Human papillomavirus
RQMNMSQWIK

SEQ ID NO: 3385 - protein, 9 aa, Human papillomavirus
SSVAALYWY

SEQ ID NO: 3386 - protein, 9 aa, Human papillomavirus
CQDKILEHY

SEQ ID NO: 3387 - protein, 9 aa, Human papillomavirus
LYGVSFSEL

SEQ ID NO: 3388 - protein, 10 aa, Human papillomavirus
SYFGMSFIHF

SEQ ID NO: 3389 - protein, 9 aa, Human papillomavirus
YYITETGIW

SEQ ID NO: 3390 - protein, 10 aa, Human papillomavirus
FIQGAVISFV

SEQ ID NO: 3391 - protein, 10 aa, Human papillomavirus
YLCIDGQCTV

SEQ ID NO: 3392 - protein, 9 aa, Human papillomavirus
RLECAIYYK

SEQ ID NO: 3393 - protein, 9 aa, Human papillomavirus
TVSATQLVK

SEQ ID NO: 3394 - protein, 9 aa, Human papillomavirus
ATTPIIHLK

SEQ ID NO: 3395 - protein, 9 aa, Human papillomavirus
MSMSQWIKY

SEQ ID NO: 3396 - protein, 9 aa, Human papillomavirus
LQDKIIDHY

SEQ ID NO: 3397 - protein, 10 aa, Human papillomavirus
MLETLNNTEY

SEQ ID NO: 3398 - protein, 10 aa, Human papillomavirus
VFTFPNEFPF

SEQ ID NO: 3399 - protein, 9 aa, Human papillomavirus
HYTNWKFIY

SEQ ID NO: 3400 - protein, 10 aa, Human papillomavirus
VFTFPHAFPF

SEQ ID NO: 3401 - protein, 9 aa, Human papillomavirus
TLQDVSLEV

SEQ ID NO: 3402 - protein, 9 aa, Human papillomavirus
NTGILTVTY

SEQ ID NO: 3403 - protein, 10 aa, Human papillomavirus
VFEFPNAFPF

SEQ ID NO: 3404 - DNA, 1782 bp, Human papillomavirus
gtactgcaggccgccaccatgggcatgcaggtgcagatccagagcctgttcctgctcctgctgtgggtgccaggaagcagaggcgtcttcgagttccccaacgccttccccttcaaggccgcagccgtcatgtgccggcattacaaaagaaacgccgtgttcaccttccctaaccctttcccattcaacgccgctaagagcgctatcgtgaccctcacctacaaggctgccaacaccatgcactacaccaactggaagaactccacagccgcagccctgtactggtacaagaaggctttcctccagggcagcgtgatctgcttcgtgaaggctaccctgtacgcccacatccagtgcctgaacgtgatggacgatagcgagatcgcttacaatcactacaccaactggacccacatctacaacggctacaacaccttctacatcgagttcaaggccgcaaagctgctggagaagctgctctgcatcggagcctacctgtgcattgacggccagtgcaccgtgaaaatgctggagaccctcaacaatacagagtacaacgccgcaactacccccatcattcacctgaagaacgctttcatccagggagccgtgatcagcttcgtcaaggcaacagtgagcgccacccagctggtgaagaacgtgttcaccttcccaaacgaatttcctttcaatcattacaccaactggaagttcatctacggcgccgcagccctccaggacaagatcattgaccactacaaagccgcagccatgtccatgtcccagtggatcaaatatggcgccgcaagactggagtgtgccatctactataagaacgccgcagtcttcaccttccctcacgcctttcccttcaacgcagctgccaagttcgtggccgcatggactctgaaggccgcagccaaactcctccagcaatactgcctgtacctgaacgctgccgtggcctgggattccgtgtactatatgaaggccgcagccgctatctttggagtgaaccccaccgtgaaggccctgacctacgacagcgagtggcagcggaacccctacctccactccagactggtggtcttcaacgccgcagccagcaccgtcagcgtgggcaccgccaagaacgccgcactccaggataagatcctggaccactacaaggccgcagcccaggtggactactatggcctgtactacaacgccgcagccacctgcgtgagccacagaggcctgtacaacgtgacctacaacagcgaggtgcagcggaactactacatgaccgacgcaggaacctggaacgccgcttacacaaactggaagttcatctacctgaacgccgcaatcagcttcgccggaattgtgaccaagaaaaggcagatgaacatgagccagtggatcaagaacgcagccgcatactacatcactgagaccggcatctggaaggccgctatcctgtacgcccacatccagtgcctgaactacgtcgtgtgggacagcatttactacatcaacgcctcctactttggcatgagctttatccacttcaaagccgcccaggtggtccccgcctacaacatcagcaagaacgccgccctgtacggcgtcagcttcagcgagctgaagtgccaggacaagatcctggaacactacaaggccgccagcagcgtcgccgccctctactggtacggagccgccaccctgcaagatgtgagcctggaggtgaacaccggaatcctgacagtgacctacggagcggccgcatgaggatccgcg

SEQ ID NO: 3405 - DNA, 1788 bp, Human papillomavirus
gtactgcaggccgccaccatgggcatgcaggtgcagatccagagcctgttcctgctcctgctgtgggtgccaggaagcagaggccaggtcgactactatggactgtactataacgccgctgccagcaccgtgtccgtgggcaccgccaagaacgtggcctgggactccgtctactatatgaaggccgcactcacctacgatagcgaatggcagagaaacgcagccgcaaagttcgtcgccgcttggacactgaaggctgccgcaaaagccatcttcggcgtgaacccaaccgtgaaagccgcagctctgctccagcaatactgcctgtacctgaactactatatgaccgacgccggcacctggaatgcagtgacctacaacagcgaggtgcagcggaacgccgctctgcaagataagatcctggaccactacaaggcagcagctccctacctgcacagcagactcgtcgtgttcaacgccgctgccacctgcgtcagccaccggggcctgtacaccctgtacgcccatatccagtgcctgaacactatgcactacaccaactggaagaacgccttcctccagggctccgtcatctgcttcgtgaaggccgcagtgatggacgatagcgagatcgcctacaatgcagctaagtccgccattgtcacactgacatacaaggtgttcaccttccctaaccccttccccttcaacagcaccgccgcagctctgtactggtacaagaaagctgccgctaagctgctggagaagctgctctgcatcaacggctacaacactttctacatcgagttcaaggccgcagccgtgatgtgccggcactacaagagaaaccactacaccaactggacacacatctacggagccgctgccatcctgtacgcccacattcagtgcctgaacgcagccgcaaggcagatgaacatgagccagtggatcaagaacgccgcatacaccaactggaagttcatctacctgaacgcctgtcaggacaaaatcctggagcactacaagattagcttcgccggaatcgtgactaagaaatactacatcaccgagaccggaatctggaagagctccgtcgccgcactgtactggtacaacgccgctgccagctacttcggcatgagcttcatccacttcaaagccgcagccctgtacggagtgagctttagcgaactgaaggccgcacaggtggtccccgcctacaacatcagcaagaactacgtggtctgggacagcatttactacatcaacgccttcatccagggcgccgtgatcagcttcgtgaaagccgcagtgttcaccttccctcacgccttcccttttggcgccgctgccgtgtttaccttccccaatgagtttcccttcggcgccgcagccctccaggacaagatcattgatcactacaaggccgcatacctgtgcatcgacggccagtgcaccgtgaaggccagactggagtgcgccatctactacaagaacgccaccgtgtccgccacccagctggtgaagaacatgagcatgagccagtggatcaagtacaaccattacaccaactggaaatttatctacaacgccgccaccacacccatcatccacctcaagaacgccatgctggagaccctgaacaacaccgagtacggagccgccgccgtgttcgagttccccaacgccttcccattcaaggccgccaccctccaggacgtgagcctggaggtgaacaccggaatcctgaccgtgacctacggagcggccgcatgaggatccgcg

SEQ ID NO: 3406 - protein, 584 aa, Human papillomavirus
MGMQVQIQSLFLLLLWVPGSRGVFEFPNAFPFKAAAVMCRHYKRNAVFTFPNPFPFNAAKSAIVTLTYKAANTMHYTNWKNSTAAALYWYKKAFLQGSVICFVKATLYAHIQCLNVMDDSEIAYNHYTNWTHIYNGYNTFYIEFKAAKLLEKLLCIGAYLCIDGQCTVKMLETLNNTEYNAATTPIIHLKNAFIQGAVISFVKATVSATQLVKNVFTFPNEFPFNHYTNWKFIYGAAALQDKIIDHYKAAAMSMSQWIKYGAARLECAIYYKNAAVFTFPHAFPFNAAAKFVAAWTLKAAAKLLQQYCLYLNAAVAWDSVYYMKAAAAIFGVNPTVKALTYDSEWQRNPYLHSRLVVFNAAASTVSVGTAKNAALQDKILDHYKAAAQVDYYGLYYNAAATCVSHRGLYNVTYNSEVQRNYYMTDAGTWNAAYTNWKFIYLNAAISFAGIVTKKRQMNMSQWIKNAAAYYITETGIWKAAILYAHIQCLNYVVWDSIYYINASYFGMSFIHFKAAQVVPAYNISKNAALYGVSFSELKCQDKILEHYKAASSVAALYWYGAATLQDVSLEVNTGILTVTYGAAA

SEQ ID NO: 3407 - protein, 586 aa, Human papillomavirus
MGMQVQIQSLFLLLLWVPGSRGQVDYYGLYYNAAASTVSVGTAKNVAWDSVYYMKAALTYDSEWQRNAAAKFVAAWTLKAAAKAIFGVNPTVKAAALLQQYCLYLNYYMTDAGTWNAVTYNSEVQRNAALQDKILDHYKAAAPYLHSRLVVFNAAATCVSHRGLYTLYAHIQCLNTMHYTNWKNAFLQGSVICFVKAAVMDDSEIAYNAAKSAIVTLTYKVFTFPNPFPFNSTAAALYWYKKAAAKLLEKLLCINGYNTFYIEFKAAAVMCRHYKRNHYTNWTHIYGAAAILYAHIQCLNAAARQMNMSQWIKNAAYTNWKFIYLNACQDKILEHYKISFAGIVTKKYYITETGIWKSSVAALYWYNAAASYFGMSFIHFKAAALYGVSFSELKAAQVVPAYNISKNYVVWDSIYYINAFIQGAVISFVKAAVFTFPHAFPFGAAAVFTFPNEFPFGAAALQDKIIDHYKAAYLCIDGQCTVKARLECAIYYKNATVSATQLVKNMSMSQWIKYNHYTNWKFIYNAATTPIIHLKNAMLETLNNTEYGAAAVFEFPNAFPFKAATLQDVSLEVNTGILTVTYGAAA

SEQ ID NO: 3408 - protein, 15 aa, Human papillomavirus
LYWYKTGISNISEVY

SEQ ID NO: 3409 - protein, 15 aa, Human papillomavirus
KHIRLECVLMYKARE

SEQ ID NO: 3410 - protein, 15 aa, Human papillomavirus
FKTLIQPFILYAHIQ

SEQ ID NO: 3411 - protein, 15 aa, Human papillomavirus
KVAMLDDATHTCWTY

SEQ ID NO: 3412 - protein, 15 aa, Human papillomavirus
NGWFYVEAVIDRQTG

SEQ ID NO: 3413 - protein, 15 aa, Human papillomavirus
VVTIPNSVQISVGYM

SEQ ID NO: 3414 - protein, 15 aa, Human papillomavirus
IHFLQGAIISFVNSN

SEQ ID NO: 3415 - protein, 15 aa, Human papillomavirus
EKQRTKFLNTVAIPD

SEQ ID NO: 3416 - protein, 15 aa, Human papillomavirus
VHEGIRTYFVQFKDD

SEQ ID NO: 3417 - protein, 15 aa, Human papillomavirus
IEFITFLGALKSFLK

SEQ ID NO: 3418 - protein, 15 aa, Human papillomavirus
GNKDNCMTYVAWDSV

SEQ ID NO: 3419 - protein, 15 aa, Human papillomavirus
PEWIQRQTVLQHSFN

SEQ ID NO: 3420 - protein, 15 aa, Human papillomavirus
SDEISFAGIVTKLPT

SEQ ID NO: 3421 - protein, 15 aa, Human papillomavirus
YENDSTDLRDHIDYW

SEQ ID NO: 3422 - protein, 15 aa, Human papillomavirus
PINISKSKAHKAIEL

SEQ ID NO: 3423 - protein, 15 aa, Human papillomavirus
PEWIERQTVLQHSFN

SEQ ID NO: 3424 - protein, 15 aa, Human papillomavirus
VHEGIRTYFVQFKDD

SEQ ID NO: 3425 - protein, 15 aa, Human papillomavirus
VVTIPNSVQISVGYM

SEQ ID NO: 3426 - protein, 15 aa, Human papillomavirus
PEWIERQTVLQHSFN

SEQ ID NO: 3427 - protein, 15 aa, Human papillomavirus
EKQRTKFLNTVAIPD

SEQ ID NO: 3428 - protein, 15 aa, Human papillomavirus
PEWIQRQTVLQHSFN

SEQ ID NO: 3429 - protein, 15 aa, Human papillomavirus
FKTLIQPFILYAHIQ

SEQ ID NO: 3430 - protein, 15 aa, Human papillomavirus
GNKDNCMTYVAWDSV

SEQ ID NO: 3431 - protein, 15 aa, Human papillomavirus
NGWFYVEAVIDRQTG

SEQ ID NO: 3432 - protein, 15 aa, Human papillomavirus
YENDSTDLRDHIDYW

SEQ ID NO: 3433 - protein, 15 aa, Human papillomavirus
IHFLQGAIISFVNSN

SEQ ID NO: 3434 - protein, 15 aa, Human papillomavirus
PINISKSKAHKAIEL

SEQ ID NO: 3435 - protein, 15 aa, Human papillomavirus
LYWYKTGISNISEVY

SEQ ID NO: 3436 - protein, 15 aa, Human papillomavirus
SDEISFAGIVTKLPT

SEQ ID NO: 3437 - protein, 15 aa, Human papillomavirus
KHIRLECVLMYKARE

SEQ ID NO: 3438 - protein, 15 aa, Human papillomavirus
IEFITFLGALKSFLK

SEQ ID NO: 3439 - protein, 15 aa, Human papillomavirus
KVAMLDDATHTCWTY

SEQ ID NO: 3440 - protein, 15 aa, Human papillomavirus
LYWYKTGISNISEVY

SEQ ID NO: 3441 - protein, 15 aa, Human papillomavirus
KHIRLECVLMYKARE

SEQ ID NO: 3442 - protein, 15 aa, Human papillomavirus
FKTLIQPFILYAHIQ

SEQ ID NO: 3443 - protein, 15 aa, Human papillomavirus
KVAMLDDATHTCWTY

SEQ ID NO: 3444 - protein, 15 aa, Human papillomavirus
NGWFYVEAVIDRQTG

SEQ ID NO: 3445 - protein, 15 aa, Human papillomavirus
VVTIPNSVQISVGYM

SEQ ID NO: 3446 - protein, 15 aa, Human papillomavirus
IHFLQGAIISFVNSN

SEQ ID NO: 3447 - protein, 15 aa, Human papillomavirus
EKQRTKFLNTVAIPD

SEQ ID NO: 3448 - protein, 15 aa, Human papillomavirus
VHEGIRTYFVQFKDD

SEQ ID NO: 3449 - protein, 15 aa, Human papillomavirus
IEFITFLGALKSFLK

SEQ ID NO: 3450 - protein, 15 aa, Human papillomavirus
GNKDNCMTYVAWDSV

SEQ ID NO: 3451 - protein, 15 aa, Human papillomavirus
PEWIQRQTVLQHSFN

SEQ ID NO: 3452 - protein, 15 aa, Human papillomavirus
SDEISFAGIVTKLPT

SEQ ID NO: 3453 - protein, 15 aa, Human papillomavirus
YENDSTDLRDHIDYW

SEQ ID NO: 3454 - protein, 15 aa, Human papillomavirus
PINISKSKAHKAIEL

SEQ ID NO: 3455 - protein, 15 aa, Human papillomavirus
PEWIERQTVLQHSFN

SEQ ID NO: 3456 - protein, 15 aa, Human papillomavirus
VHEGIRTYFVQFKDD

SEQ ID NO: 3457 - protein, 15 aa, Human papillomavirus
VVTIPNSVQISVGYM

SEQ ID NO: 3458 - protein, 15 aa, Human papillomavirus
PEWIERQTVLQHSFN

SEQ ID NO: 3459 - protein, 15 aa, Human papillomavirus
EKQRTKFLNTVAIPD

SEQ ID NO: 3460 - protein, 15 aa, Human papillomavirus
PEWIQRQTVLQHSFN

SEQ ID NO: 3461 - protein, 15 aa, Human papillomavirus
FKTLIQPFILYAHIQ

SEQ ID NO: 3462 - protein, 15 aa, Human papillomavirus
GNKDNCMTYVAWDSV

SEQ ID NO: 3463 - protein, 15 aa, Human papillomavirus
NGWFYVEAVIDRQTG

SEQ ID NO: 3464 - protein, 15 aa, Human papillomavirus
YENDSTDLRDHIDYW

SEQ ID NO: 3465 - protein, 15 aa, Human papillomavirus
IHFLQGAIISFVNSN

SEQ ID NO: 3466 - protein, 15 aa, Human papillomavirus
PINISKSKAHKAIEL

SEQ ID NO: 3467 - protein, 15 aa, Human papillomavirus
LYWYKTGISNISEVY

SEQ ID NO: 3468 - protein, 15 aa, Human papillomavirus
SDEISFAGIVTKLPT

SEQ ID NO: 3469 - protein, 15 aa, Human papillomavirus
KHIRLECVLMYKARE

SEQ ID NO: 3470 - protein, 15 aa, Human papillomavirus
IEFITFLGALKSFLK

SEQ ID NO: 3471 - protein, 15 aa, Human papillomavirus
KVAMLDDATHTCWTY

SEQ ID NO: 3472 - protein, 15 aa, Human papillomavirus
LYWYKTGISNISEVY

SEQ ID NO: 3473 - protein, 15 aa, Human papillomavirus
KHIRLECVLMYKARE

SEQ ID NO: 3474 - protein, 15 aa, Human papillomavirus
FKTLIQPFILYAHIQ

SEQ ID NO: 3475 - protein, 15 aa, Human papillomavirus
KVAMLDDATHTCWTY

SEQ ID NO: 3476 - protein, 15 aa, Human papillomavirus
NGWFYVEAVIDRQTG

SEQ ID NO: 3477 - protein, 15 aa, Human papillomavirus
VVTIPNSVQISVGYM

SEQ ID NO: 3478 - protein, 15 aa, Human papillomavirus
IHFLQGAIISFVNSN

SEQ ID NO: 3479 - protein, 15 aa, Human papillomavirus
ETQRTKFLNTVAIPD

SEQ ID NO: 3480 - protein, 15 aa, Human papillomavirus
VHEGIRTYFVQFKDD

SEQ ID NO: 3481 - protein, 15 aa, Human papillomavirus
IEFITFLGALKSFLK

SEQ ID NO: 3482 - protein, 15 aa, Human papillomavirus
GNKDNCMTYVAWDSV

SEQ ID NO: 3483 - protein, 15 aa, Human papillomavirus
PEWIQRQTVLQHSFN

SEQ ID NO: 3484 - protein, 15 aa, Human papillomavirus
SDEISFAGIVTKLPT

SEQ ID NO: 3485 - protein, 15 aa, Human papillomavirus
YENDSTDLRDHIDYW

SEQ ID NO: 3486 - protein, 15 aa, Human papillomavirus
PINISKSKAHKAIEL

SEQ ID NO: 3487 - protein, 15 aa, Human papillomavirus
PEWIERQTVLQHSFN

SEQ ID NO: 3488 - protein, 15 aa, Human papillomavirus
VHEGIRTYFVQFKDD

SEQ ID NO: 3489 - protein, 15 aa, Human papillomavirus
VVTIPNSVQISVGYM

SEQ ID NO: 3490 - protein, 15 aa, Human papillomavirus
PEWIERQTVLQHSFN

SEQ ID NO: 3491 - protein, 15 aa, Human papillomavirus
ETQRTKFLNTVAIPD

SEQ ID NO: 3492 - protein, 15 aa, Human papillomavirus
PEWIQRQTVLQHSFN

SEQ ID NO: 3493 - protein, 15 aa, Human papillomavirus
FKTLIQPFILYAHIQ

SEQ ID NO: 3494 - protein, 15 aa, Human papillomavirus
GNKDNCMTYVAWDSV

SEQ ID NO: 3495 - protein, 15 aa, Human papillomavirus
NGWFYVEAVIDRQTG

SEQ ID NO: 3496 - protein, 15 aa, Human papillomavirus
YENDSTDLRDHIDYW

SEQ ID NO: 3497 - protein, 15 aa, Human papillomavirus
IHFLQGAIISFVNSN

SEQ ID NO: 3498 - protein, 15 aa, Human papillomavirus
PINISKSKAHKAIEL

SEQ ID NO: 3499 - protein, 15 aa, Human papillomavirus
LYWYKTGISNISEVY

SEQ ID NO: 3500 - protein, 15 aa, Human papillomavirus
SDEISFAGIVTKLPT

SEQ ID NO: 3501 - protein, 15 aa, Human papillomavirus
KHIRLECVLMYKARE

SEQ ID NO: 3502 - protein, 15 aa, Human papillomavirus
IEFITFLGALKSFLK

SEQ ID NO: 3503 - protein, 15 aa, Human papillomavirus
KVAMLDDATHTCWTY

SEQ ID NO: 3504 - protein, 316 aa, Human papillomavirus
LYWYKTGISNISEVYGPGPGKHIRLLECVLMYKAREGPGPGFKTLIQPFILYAHIQGPGPGKVAMLDDATHTCWTYGPGPGNGWFYVEAVIDRQTGGPGPGVVTIPNSVQISVGYMGPGPGIHFLQGAIISFVNSNGPGPGEKQRTKFLNTVAIPDGPGPGVHEGIRTYFVQFKDDGPGPGIEFITFLGALKSFLKGPGPGGNKDNCMTYVAWDSVGPGPGPEWIQRQTVLQHSFNGPGPGSDEISFAGIVTKLPTGPGPGYENDSTDLRDHIDYWGPGPGPINISKSKAHKAIELGPGPGPEWIERQTVLQHSFN

SEQ ID NO: 3505 - DNA, 951 bp, Human papillomavirus
ctgtactggtacaaaaccggcatcagcaacatttccgaggtgtacggcccaggacccgggaagcacatccggctgctcgagtgcgtgctgatgtacaaggcccgcgaaggaccagggcccggcttcaagaccctgattcagccctttatcctgtacgcccacatccaggggcccggccctggaaaggtggccatgctcgacgatgctacacatacttgctggacctatgggcctggcccaggaaacggctggttctacgtggaggccgtcatcgaccggcagaccggcggaccaggccccggtgtggtcacaattcctaacagcgtgcagatctccgtcggatacatggggcctggcccaggaatccacttcctgcaaggcgccattatcagctttgtcaattccaacggacctggtcccggggagaagcagagaaccaaattcctgaacacagtcgctatccccgatgggcccggccctggggtgcacgaaggcattcggacttacttcgtgcagtttaaggacgatggcccagggcccggaatcgagttcattacctttctgggcgccctcaagagcttcctgaaagggcctggaccaggcggaaacaaggacaattgcatgacctacgtggcctgggactccgtcggcccaggacctggcccagagtggattcagagacaaactgtgctgcagcatagcttcaacggtcccggcccaggaagcgacgagatctcctttgctggcatcgttaccaagctgcccacaggccctggacccggctacgagaatgacagcaccgatctgcgggaccacatcgactactgggggccaggacctggccccatcaacattagcaagtccaaagcccataaggctatcgaactgggacccggcccagggcccgagtggattgaaagacagacagtgctccagcacagcttcaactga

SEQ ID NO: 3506 - protein, 315 aa, Human papillomavirus
LYWYKTGISNISEVYGPGPGKHIRLECVLMYKAREGPGPGFKTLIQPFILYAHIQGPGPGKVAMLDDATHTCWTYGPGPGNGWFYVEAVIDRQTGGPGPGVVTIPNSVQISVGYMGPGPGIHFLQGAIISFVNSNGPGPGEKQRTKFLNTVAIPDGPGPGVHEGIRTYFVQFKDDGPGPGIEFITFLGALKSFLKGPGPGGNKDNCMTYVAWDSVGPGPGPEWIQRQTVLQHSFNGPGPGSDEISFAGIVTKLPTGPGPGYENDSTDLRDHIDYWGPGPGPINISKSKAHKAIELGPGPGPEWIERQTVLQHSFN

SEQ ID NO: 3507 - DNA, 948 bp, Human papillomavirus
ctgtactggtacaaaaccggcatcagcaacatttccgaggtgtacggcccaggacccgggaagcacatccggctggagtgcgtgctgatgtacaaggcccgcgaaggaccagggcccggcttcaagaccctgattcagccctttatcctgtacgcccacatccaggggcccggccctggaaaggtggccatgctcgacgatgctacacatacttgctggacctatgggcctggcccaggaaacggctggttctacgtggaggccgtcatcgaccggcagaccggcggaccaggccccggtgtggtcacaattcctaacagcgtgcagatctccgtcggatacatggggcctggcccaggaatccacttcctgcaaggcgccattatcagctttgtcaattccaacggacctggtcccggggagaagcagagaaccaaattcctgaacacagtcgctatccccgatgggcccggccctggggtgcacgaaggcattcggacttacttcgtgcagtttaaggacgatggcccagggcccggaatcgagttcattacctttctgggcgccctcaagagcttcctgaaagggcctggaccaggcggaaacaaggacaattgcatgacctacgtggcctgggactccgtcggcccaggacctggcccagagtggattcagagacaaactgtgctgcagcatagcttcaacggtcccggcccaggaagcgacgagatctcctttgctggcatcgttaccaagctgcccacaggccctggacccggctacgagaatgacagcaccgatctgcgggaccacatcgactactgggggccaggacctggccccatcaacattagcaagtccaaagcccataaggctatcgaactgggacccggcccagggcccgagtggattgaaagacagacagtgctccagcacagcttcaactga

SEQ ID NO: 3508 - protein, 316 aa, Human papillomavirus
VHEGIRTYFVQFKDDGPGPGVVTIPNSVQISVGYMGPGPGPEWIERQTVLQHSFNGPGPGEKQRTKFLNTVAIPDGPGPGPEWIQRQTVLQHSFNGPGPGFKTLIQPFILYAHIQGPGPGGNKDNCMTYVAWDSVGPGPGNGWFYVEAVIDRQTGGPGPGYENDSTDLRDHIDYWGPGPGIHFLQGAIISFVNSNGPGPGPINISKSKAHKAIELGPGPGLYWYKTGISNISEVYGPGPGSDEISFAGIVTKLPTGPGPGKHIRLLECVLMYKAREGPGPGIEFITFLGALKSFLKGPGPGKVAMLDDATHTCWTY

SEQ ID NO: 3509 - DNA, 951 bp, Human papillomavirus
gtgcacgaaggcattcggacttacttcgtgcagtttaaggacgatggcccagggcccggagtggtcacaattcctaacagcgtgcagatctccgtcggatacatggggcctggcccaggacccgagtggattgaaagacagacagtgctccagcacagcttcaacggcccaggacccggggagaagcagagaaccaaattcctgaacacagtcgctatccccgatgggcccggccctgggccagagtggattcagagacaaactgtgctgcagcatagcttcaacggtcccggcccaggattcaagaccctgattcagccctttatcctgtacgcccacatccaggggcccggccctggaggaaacaaggacaattgcatgacctacgtggcctgggactccgtcggcccaggacctggcaacggctggttctacgtggaggccgtcatcgaccggcagaccggcggaccaggccccggttacgagaatgacagcaccgatctgcgggaccacatcgactactgggggccaggacctggcatccacttcctgcaaggcgccattatcagctttgtcaattccaacggacctggtcccgggcccatcaacattagcaagtccaaagcccataaggctatcgaactgggacccggcccagggctgtactggtacaaaaccggcatcagcaacatttccgaggtgtacgggcctggcccaggaagcgacgagatctcctttgctggcatcgttaccaagctgcccacaggccctggacccggcaagcacatccggctgctcgagtgcgtgctgatgtacaaggcccgcgaaggaccagggcccggcatcgagttcattacctttctgggcgccctcaagagcttcctgaaagggcctggaccaggcaaggtggccatgctcgacgatgctacacatacttgctggacctattga

SEQ ID NO: 3510 - protein, 315 aa, Human papillomavirus
VHEGIRTYFVQFKDDGPGPGVVTIPNSVQISVGYMGPGPGPEWIERQTVLQHSFNGPGPGEKQRTKFLNTVAIPDGPGPGPEWIQRQTVLQHSFNGPGPGFKTLIQPFILYAHIQGPGPGGNKDNCMTYVAWDSVGPGPGNGWFYVEAVIDRQTGGPGPGYENDSTDLRDHIDYWGPGPGIHFLQGAIISFVNSNGPGPGPINISKSKAHKAIELGPGPGLYWYKTGISNISEVYGPGPGSDEISFAGIVTKLPTGPGPGKHIRLECVLMYKAREGPGPGIEFITFLGALKSFLKGPGPGKVAMLDDATHTCWTY

SEQ ID NO: 3511 - DNA, 948 bp, Human papillomavirus
gtgcacgaaggcattcggacttacttcgtgcagtttaaggacgatggcccagggcccggagtggtcacaattcctaacagcgtgcagatctccgtcggatacatggggcctggcccaggacccgagtggattgaaagacagacagtgctccagcacagcttcaacggcccaggacccggggagaagcagagaaccaaattcctgaacacagtcgctatccccgatgggcccggccctgggccagagtggattcagagacaaactgtgctgcagcatagcttcaacggtcccggcccaggattcaagaccctgattcagccctttatcctgtacgcccacatccaggggcccggccctggaggaaacaaggacaattgcatgacctacgtggcctgggactccgtcggcccaggacctggcaacggctggttctacgtggaggccgtcatcgaccggcagaccggcggaccaggccccggttacgagaatgacagcaccgatctgcgggaccacatcgactactgggggccaggacctggcatccacttcctgcaaggcgccattatcagctttgtcaattccaacggacctggtcccgggcccatcaacattagcaagtccaaagcccataaggctatcgaactgggacccggcccagggctgtactggtacaaaaccggcatcagcaacatttccgaggtgtacgggcctggcccaggaagcgacgagatctcctttgctggcatcgttaccaagctgcccacaggccctggacccggcaagcacatccggctggagtgcgtgctgatgtacaaggcccgcgaaggaccagggcccggcatcgagttcattacctttctgggcgccctcaagagcttcctgaaagggcctggaccaggcaaggtggccatgctcgacgatgctacacatacttgctggacctattga

SEQ ID NO: 3512 - DNA, 2717 bp, Human papillomavirus
ggccgccaccatgggcatgcaggtgcagatccagagcctgttcctgctcctgctgtgggtgccaggaagcagaggcgtcttcgagttccccaacgccttccccttcaaggccgcagccgtcatgtgccggcattacaaaagaaacgccgtgttcaccttccctaaccctttcccattcaacgccgctaagagcgctatcgtgaccctcacctacaaggctgccaacaccatgcactacaccaactggaagaactccacagccgcagccctgtactggtacaagaaggctttcctccagggcagcgtgatctgcttcgtgaaggctaccctgtacgcccacatccagtgcctgaacgtgatggacgatagcgagatcgcttacaatcactacaccaactggacccacatctacaacggctacaacaccttctacatcgagttcaaggccgcaaagctgctggagaagctgctctgcatcggagcctacctgtgcattgacggccagtgcaccgtgaaaatgctggagaccctcaacaatacagagtacaacgccgcaactacccccatcattcacctgaagaacgctttcatccagggagccgtgatcagcttcgtcaaggcaacagtgagcgccacccagctggtgaagaacgtgttcaccttcccaaacgaatttcctttcaatcattacaccaactggaagttcatctacggcgccgcagccctccaggacaagatcattgaccactacaaagccgcagccatgtccatgtcccagtggatcaaatatggcgccgcaagactggagtgtgccatctactataagaacgccgcagtcttcaccttccctcacgcctttcccttcaacgcagctgccaagttcgtggccgcatggactctgaaggccgcagccaaactcctccagcaatactgcctgtacctgaacgctgccgtggcctgggattccgtgtactatatgaaggccgcagccgctatctttggagtgaaccccaccgtgaaggccctgacctacgacagcgagtggcagcggaacccctacctccactccagactggtggtcttcaacgccgcagccagcaccgtcagcgtgggcaccgccaagaacgccgcactccaggataagatcctggaccactacaaggccgcagcccaggtggactactatggcctgtactacaacgccgcagccacctgcgtgagccacagaggcctgtacaacgtgacctacaacagcgaggtgcagcggaactactacatgaccgacgcaggaacctggaacgccgcttacacaaactggaagttcatctacctgaacgccgcaatcagcttcgccggaattgtgaccaagaaaaggcagatgaacatgagccagtggatcaagaacgcagccgcatactacatcactgagaccggcatctggaaggccgctatcctgtacgcccacatccagtgcctgaactacgtcgtgtgggacagcatttactacatcaacgcctcctactttggcatgagctttatccacttcaaagccgcccaggtggtccccgcctacaacatcagcaagaacgccgccctgtacggcgtcagcttcagcgagctgaagtgccaggacaagatcctggaacactacaaggccgccagcagcgtcgccgccctctactggtacggagccgccaccctgcaagatgtgagcctggaggtgaacaccggaatcctgacagtgacctacggagcggccgccctgtactggtacaaaaccggcatcagcaacatttccgaggtgtacggcccaggacccgggaagcacatccggctgctcgagtgcgtgctgatgtacaaggcccgcgaaggaccagggcccggcttcaagaccctgattcagccctttatcctgtacgcccacatccaggggcccggccctggaaaggtggccatgctcgacgatgctacacatacttgctggacctatgggcctggcccaggaaacggctggttctacgtggaggccgtcatcgaccggcagaccggcggaccaggccccggtgtggtcacaattcctaacagcgtgcagatctccgtcggatacatggggcctggcccaggaatccacttcctgcaaggcgccattatcagctttgtcaattccaacggacctggtcccggggagaagcagagaaccaaattcctgaacacagtcgctatccccgatgggcccggccctggggtgcacgaaggcattcggacttacttcgtgcagtttaaggacgatggcccagggcccggaatcgagttcattacctttctgggcgccctcaagagcttcctgaaagggcctggaccaggcggaaacaaggacaattgcatgacctacgtggcctgggactccgtcggcccaggacctggcccagagtggattcagagacaaactgtgctgcagcatagcttcaacggtcccggcccaggaagcgacgagatctcctttgctggcatcgttaccaagctgcccacaggccctggacccggctacgagaatgacagcaccgatctgcgggaccacatcgactactgggggccaggacctggccccatcaacattagcaagtccaaagcccataaggctatcgaactgggacccggcccagggcccgagtggattgaaagacagacagtgctccagcacagcttcaactgataag

SEQ ID NO: 3513 - DNA, 2717 bp, Human papillomavirus
ggccgccaccatgggcatgcaggtgcagatccagagcctgttcctgctcctgctgtgggtgccaggaagcagaggcgtcttcgagttccccaacgccttccccttcaaggccgcagccgtcatgtgccggcattacaaaagaaacgccgtgttcaccttccctaaccctttcccattcaacgccgctaagagcgctatcgtgaccctcacctacaaggctgccaacaccatgcactacaccaactggaagaactccacagccgcagccctgtactggtacaagaaggctttcctccagggcagcgtgatctgcttcgtgaaggctaccctgtacgcccacatccagtgcctgaacgtgatggacgatagcgagatcgcttacaatcactacaccaactggacccacatctacaacggctacaacaccttctacatcgagttcaaggccgcaaagctgctggagaagctgctctgcatcggagcctacctgtgcattgacggccagtgcaccgtgaaaatgctggagaccctcaacaatacagagtacaacgccgcaactacccccatcattcacctgaagaacgctttcatccagggagccgtgatcagcttcgtcaaggcaacagtgagcgccacccagctggtgaagaacgtgttcaccttcccaaacgaatttcctttcaatcattacaccaactggaagttcatctacggcgccgcagccctccaggacaagatcattgaccactacaaagccgcagccatgtccatgtcccagtggatcaaatatggcgccgcaagactggagtgtgccatctactataagaacgccgcagtcttcaccttccctcacgcctttcccttcaacgcagctgccaagttcgtggccgcatggactctgaaggccgcagccaaactcctccagcaatactgcctgtacctgaacgctgccgtggcctgggattccgtgtactatatgaaggccgcagccgctatctttggagtgaaccccaccgtgaaggccctgacctacgacagcgagtggcagcggaacccctacctccactccagactggtggtcttcaacgccgcagccagcaccgtcagcgtgggcaccgccaagaacgccgcactccaggataagatcctggaccactacaaggccgcagcccaggtggactactatggcctgtactacaacgccgcagccacctgcgtgagccacagaggcctgtacaacgtgacctacaacagcgaggtgcagcggaactactacatgaccgacgcaggaacctggaacgccgcttacacaaactggaagttcatctacctgaacgccgcaatcagcttcgccggaattgtgaccaagaaaaggcagatgaacatgagccagtggatcaagaacgcagccgcatactacatcactgagaccggcatctggaaggccgctatcctgtacgcccacatccagtgcctgaactacgtcgtgtgggacagcatttactacatcaacgcctcctactttggcatgagctttatccacttcaaagccgcccaggtggtccccgcctacaacatcagcaagaacgccgccctgtacggcgtcagcttcagcgagctgaagtgccaggacaagatcctggaacactacaaggccgccagcagcgtcgccgccctctactggtacggagccgccaccctgcaagatgtgagcctggaggtgaacaccggaatcctgacagtgacctacggagcggccgccgtgcacgaaggcattcggacttacttcgtgcagtttaaggacgatggcccagggcccggagtggtcacaattcctaacagcgtgcagatctccgtcggatacatggggcctggcccaggacccgagtggattgaaagacagacagtgctccagcacagcttcaacggcccaggacccggggagaagcagagaaccaaattcctgaacacagtcgctatccccgatgggcccggccctgggccagagtggattcagagacaaactgtgctgcagcatagcttcaacggtcccggcccaggattcaagaccctgattcagccctttatcctgtacgcccacatccaggggcccggccctggaggaaacaaggacaattgcatgacctacgtggcctgggactccgtcggcccaggacctggcaacggctggttctacgtggaggccgtcatcgaccggcagaccggcggaccaggccccggttacgagaatgacagcaccgatctgcgggaccacatcgactactgggggccaggacctggcatccacttcctgcaaggcgccattatcagctttgtcaattccaacggacctggtcccgggcccatcaacattagcaagtccaaagcccataaggctatcgaactgggacccggcccagggctgtactggtacaaaaccggcatcagcaacatttccgaggtgtacgggcctggcccaggaagcgacgagatctcctttgctggcatcgttaccaagctgcccacaggccctggacccggcaagcacatccggctgctcgagtgcgtgctgatgtacaaggcccgcgaaggaccagggcccggcatcgagttcattacctttctgggcgccctcaagagcttcctgaaagggcctggaccaggcaaggtggccatgctcgacgatgctacacatacttgctggacctattgataag

SEQ ID NO: 3514 - DNA, 2723 bp, Human papillomavirus
ggccgccaccatgggcatgcaggtgcagatccagagcctgttcctgctcctgctgtgggtgccaggaagcagaggccaggtcgactactatggactgtactataacgccgctgccagcaccgtgtccgtgggcaccgccaagaacgtggcctgggactccgtctactatatgaaggccgcactcacctacgatagcgaatggcagagaaacgcagccgcaaagttcgtcgccgcttggacactgaaggctgccgcaaaagccatcttcggcgtgaacccaaccgtgaaagccgcagctctgctccagcaatactgcctgtacctgaactactatatgaccgacgccggcacctggaatgcagtgacctacaacagcgaggtgcagcggaacgccgctctgcaagataagatcctggaccactacaaggcagcagctccctacctgcacagcagactcgtcgtgttcaacgccgctgccacctgcgtcagccaccggggcctgtacaccctgtacgcccatatccagtgcctgaacactatgcactacaccaactggaagaacgccttcctccagggctccgtcatctgcttcgtgaaggccgcagtgatggacgatagcgagatcgcctacaatgcagctaagtccgccattgtcacactgacatacaaggtgttcaccttccctaaccccttccccttcaacagcaccgccgcagctctgtactggtacaagaaagctgccgctaagctgctggagaagctgctctgcatcaacggctacaacactttctacatcgagttcaaggccgcagccgtgatgtgccggcactacaagagaaaccactacaccaactggacacacatctacggagccgctgccatcctgtacgcccacattcagtgcctgaacgcagccgcaaggcagatgaacatgagccagtggatcaagaacgccgcatacaccaactggaagttcatctacctgaacgcctgtcaggacaaaatcctggagcactacaagattagcttcgccggaatcgtgactaagaaatactacatcaccgagaccggaatctggaagagctccgtcgccgcactgtactggtacaacgccgctgccagctacttcggcatgagcttcatccacttcaaagccgcagccctgtacggagtgagctttagcgaactgaaggccgcacaggtggtccccgcctacaacatcagcaagaactacgtggtctgggacagcatttactacatcaacgccttcatccagggcgccgtgatcagcttcgtgaaagccgcagtgttcaccttccctcacgccttcccttttggcgccgctgccgtgtttaccttccccaatgagtttcccttcggcgccgcagccctccaggacaagatcattgatcactacaaggccgcatacctgtgcatcgacggccagtgcaccgtgaaggccagactggagtgcgccatctactacaagaacgccaccgtgtccgccacccagctggtgaagaacatgagcatgagccagtggatcaagtacaaccattacaccaactggaaatttatctacaacgccgccaccacacccatcatccacctcaagaacgccatgctggagaccctgaacaacaccgagtacggagccgccgccgtgttcgagttccccaacgccttcccattcaaggccgccaccctccaggacgtgagcctggaggtgaacaccggaatcctgaccgtgacctacggagcggccgccctgtactggtacaaaaccggcatcagcaacatttccgaggtgtacggcccaggacccgggaagcacatccggctgctcgagtgcgtgctgatgtacaaggcccgcgaaggaccagggcccggcttcaagaccctgattcagccctttatcctgtacgcccacatccaggggcccggccctggaaaggtggccatgctcgacgatgctacacatacttgctggacctatgggcctggcccaggaaacggctggttctacgtggaggccgtcatcgaccggcagaccggcggaccaggccccggtgtggtcacaattcctaacagcgtgcagatctccgtcggatacatggggcctggcccaggaatccacttcctgcaaggcgccattatcagctttgtcaattccaacggacctggtcccggggagaagcagagaaccaaattcctgaacacagtcgctatccccgatgggcccggccctggggtgcacgaaggcattcggacttacttcgtgcagtttaaggacgatggcccagggcccggaatcgagttcattacctttctgggcgccctcaagagcttcctgaaagggcctggaccaggcggaaacaaggacaattgcatgacctacgtggcctgggactccgtcggcccaggacctggcccagagtggattcagagacaaactgtgctgcagcatagcttcaacggtcccggcccaggaagcgacgagatctcctttgctggcatcgttaccaagctgcccacaggccctggacccggctacgagaatgacagcaccgatctgcgggaccacatcgactactgggggccaggacctggccccatcaacattagcaagtccaaagcccataaggctatcgaactgggacccggcccagggcccgagtggattgaaagacagacagtgctccagcacagcttcaactgataag

SEQ ID NO: 3515 - DNA, 2723 bp, Human papillomavirus
ggccgccaccatgggcatgcaggtgcagatccagagcctgttcctgctcctgctgtgggtgccaggaagcagaggccaggtcgactactatggactgtactataacgccgctgccagcaccgtgtccgtgggcaccgccaagaacgtggcctgggactccgtctactatatgaaggccgcactcacctacgatagcgaatggcagagaaacgcagccgcaaagttcgtcgccgcttggacactgaaggctgccgcaaaagccatcttcggcgtgaacccaaccgtgaaagccgcagctctgctccagcaatactgcctgtacctgaactactatatgaccgacgccggcacctggaatgcagtgacctacaacagcgaggtgcagcggaacgccgctctgcaagataagatcctggaccactacaaggcagcagctccctacctgcacagcagactcgtcgtgttcaacgccgctgccacctgcgtcagccaccggggcctgtacaccctgtacgcccatatccagtgcctgaacactatgcactacaccaactggaagaacgccttcctccagggctccgtcatctgcttcgtgaaggccgcagtgatggacgatagcgagatcgcctacaatgcagctaagtccgccattgtcacactgacatacaaggtgttcaccttccctaaccccttccccttcaacagcaccgccgcagctctgtactggtacaagaaagctgccgctaagctgctggagaagctgctctgcatcaacggctacaacactttctacatcgagttcaaggccgcagccgtgatgtgccggcactacaagagaaaccactacaccaactggacacacatctacggagccgctgccatcctgtacgcccacattcagtgcctgaacgcagccgcaaggcagatgaacatgagccagtggatcaagaacgccgcatacaccaactggaagttcatctacctgaacgcctgtcaggacaaaatcctggagcactacaagattagcttcgccggaatcgtgactaagaaatactacatcaccgagaccggaatctggaagagctccgtcgccgcactgtactggtacaacgccgctgccagctacttcggcatgagcttcatccacttcaaagccgcagccctgtacggagtgagctttagcgaactgaaggccgcacaggtggtccccgcctacaacatcagcaagaactacgtggtctgggacagcatttactacatcaacgccttcatccagggcgccgtgatcagcttcgtgaaagccgcagtgttcaccttccctcacgccttcccttttggcgccgctgccgtgtttaccttccccaatgagtttcccttcggcgccgcagccctccaggacaagatcattgatcactacaaggccgcatacctgtgcatcgacggccagtgcaccgtgaaggccagactggagtgcgccatctactacaagaacgccaccgtgtccgccacccagctggtgaagaacatgagcatgagccagtggatcaagtacaaccattacaccaactggaaatttatctacaacgccgccaccacacccatcatccacctcaagaacgccatgctggagaccctgaacaacaccgagtacggagccgccgccgtgttcgagttccccaacgccttcccattcaaggccgccaccctccaggacgtgagcctggaggtgaacaccggaatcctgaccgtgacctacggagcggccgccgtgcacgaaggcattcggacttacttcgtgcagtttaaggacgatggcccagggcccggagtggtcacaattcctaacagcgtgcagatctccgtcggatacatggggcctggcccaggacccgagtggattgaaagacagacagtgctccagcacagcttcaacggcccaggacccggggagaagcagagaaccaaattcctgaacacagtcgctatccccgatgggcccggccctgggccagagtggattcagagacaaactgtgctgcagcatagcttcaacggtcccggcccaggattcaagaccctgattcagccctttatcctgtacgcccacatccaggggcccggccctggaggaaacaaggacaattgcatgacctacgtggcctgggactccgtcggcccaggacctggcaacggctggttctacgtggaggccgtcatcgaccggcagaccggcggaccaggccccggttacgagaatgacagcaccgatctgcgggaccacatcgactactgggggccaggacctggcatccacttcctgcaaggcgccattatcagctttgtcaattccaacggacctggtcccgggcccatcaacattagcaagtccaaagcccataaggctatcgaactgggacccggcccagggctgtactggtacaaaaccggcatcagcaacatttccgaggtgtacgggcctggcccaggaagcgacgagatctcctttgctggcatcgttaccaagctgcccacaggccctggacccggcaagcacatccggctgctcgagtgcgtgctgatgtacaaggcccgcgaaggaccagggcccggcatcgagttcattacctttctgggcgccctcaagagcttcctgaaagggcctggaccaggcaaggtggccatgctcgacgatgctacacatacttgctggacctattgataag

SEQ ID NO: 3516 - protein, 900 aa, Human papillomavirus
MGMQVQIQSLFLLLLWVPGSRGVFEFPNAFPFKAAAVMCRHYKRNAVFTFPNPFPFNAAKSAIVTLTYKAANTMHYTNWKNSTAAALYWYKKAFLQGSVICFVKATLYAHIQCLNVMDDSEIAYNHYTNWTHIYNGYNTFYIEFKAAKLLEKLLCIGAYLCIDGQCTVKMLETLNNTEYNAATTPIIHLKNAFIQGAVISFVKATVSATQLVKNVFTFPNEFPFNHYTNWKFIYGAAALQDKIIDHYKAAAMSMSQWIKYGAARLECAIYYKNAAVFTFPHAFPFNAAAKFVAAWTLKAAAKLLQQYCLYLNAAVAWDSVYYMKAAAAIFGVNPTVKALTYDSEWQRNPYLHSRLVVFNAAASTVSVGTAKNAALQDKILDHYKAAAQVDYYGLYYNAAATCVSHRGLYNVTYNSEVQRNYYMTDAGTWNAAYTNWKFIYLNAAISFAGIVTKKRQMNMSQWIKNAAAYYITETGIWKAAILYAHIQCLNYVVWDSIYYINASYFGMSFIHFKAAQVVPAYNISKNAALYGVSFSELKCQDKILEHYKAASSVAALYWYGAATLQDVSLEVNTGILTVTYGAAALYWYKTGISNISEVYGPGPGKHIRLLECVLMYKAREGPGPGFKTLIQPFILYAHIQGPGPGKVAMLDDATHTCWTYGPGPGNGWFYVEAVIDRQTGGPGPGVVTIPNSVQISVGYMGPGPGIHFLQGAIISFVNSNGPGPGEKQRTKFLNTVAIPDGPGPGVHEGIRTYFVQFKDDGPGPGIEFITFLGALKSFLKGPGPGGNKDNCMTYVAWDSVGPGPGPEWIQRQTVLQHSFNGPGPGSDEISFAGIVTKLPTGPGPGYENDSTDLRDHIDYWGPGPGPINISKSKAHKAIELGPGPGPEWIERQTVLQHSFN

SEQ ID NO: 3517 - protein, 900 aa, Human papillomavirus
MGMQVQIQSLFLLLLWVPGSRGVFEFPNAFPFKAAAVMCRHYKRNAVFTFPNPFPFNAAKSAIVTLTYKAANTMHYTNWKNSTAAALYWYKKAFLQGSVICFVKATLYAHIQCLNVMDDSEIAYNHYTNWTHIYNGYNTFYIEFKAAKLLEKLLCIGAYLCIDGQCTVKMLETLNNTEYNAATTPIIHLKNAFIQGAVISFVKATVSATQLVKNVFTFPNEFPFNHYTNWKFIYGAAALQDKIIDHYKAAAMSMSQWIKYGAARLECAIYYKNAAVFTFPHAFPFNAAAKFVAAWTLKAAAKLLQQYCLYLNAAVAWDSVYYMKAAAAIFGVNPTVKALTYDSEWQRNPYLHSRLVVFNAAASTVSVGTAKNAALQDKILDHYKAAAQVDYYGLYYNAAATCVSHRGLYNVTYNSEVQRNYYMTDAGTWNAAYTNWKFIYLNAAISFAGIVTKKRQMNMSQWIKNAAAYYITETGIWKAAILYAHIQCLNYVVWDSIYYINASYFGMSFIHFKAAQVVPAYNISKNAALYGVSFSELKCQDKILEHYKAASSVAALYWYGAATLQDVSLEVNTGILTVTYGAAAVHEGIRTYFVQFKDDGPGPGVVTIPNSVQISVGYMGPGPGPEWIERQTVLQHSFNGPGPGEKQRTKFLNTVAIPDGPGPGPEWIQRQTVLQHSFNGPGPGFKTLIQPFILYAHIQGPGPGGNKDNCMTYVAWDSVGPGPGNGWFYVEAVIDRQTGGPGPGYENDSTDLRDHIDYWGPGPGIHFLQGAIISFVNSNGPGPGPINISKSKAHKAIELGPGPGLYWYKTGISNISEVYGPGPGSDEISFAGIVTKLPTGPGPGKHIRLLECVLMYKAREGPGPGIEFITFLGALKSFLKGPGPGKVAMLDDATHTCWTY

SEQ ID NO: 3518 - protein, 902 aa, Human papillomavirus
MGMQVQIQSLFLLLLWVPGSRGQVDYYGLYYNAAASTVSVGTAKNVAWDSVYYMKAALTYDSEWQRNAAAKFVAAWTLKAAAKAIFGVNPTVKAAALLQQYCLYLNYYMTDAGTWNAVTYNSEVQRNAALQDKILDHYKAAAPYLHSRLVVFNAAATCVSHRGLYTLYAHIQCLNTMHYTNWKNAFLQGSVICFVKAAVMDDSEIAYNAAKSAIVTLTYKVFTFPNPFPFNSTAAALYWYKKAAAKLLEKLLCINGYNTFYIEFKAAAVMCRHYKRNHYTNWTHIYGAAAILYAHIQCLNAAARQMNMSQWIKNAAYTNWKFIYLNACQDKILEHYKISFAGIVTKKYYITETGIWKSSVAALYWYNAAASYFGMSFIHFKAAALYGVSFSELKAAQVVPAYNISKNYVVWDSIYYINAFIQGAVISFVKAAVFTFPHAFPFGAAAVFTFPNEFPFGAAALQDKIIDHYKAAYLCIDGQCTVKARLECAIYYKNATVSATQLVKNMSMSQWIKYNHYTNWKFIYNAATTPIIHLKNAMLETLNNTEYGAAAVFEFPNAFPFKAATLQDVSLEVNTGILTVTYGAAALYWYKTGISNISEVYGPGPGKHIRLLECVLMYKAREGPGPGFKTLIQPFILYAHIQGPGPGKVAMLDDATHTCWTYGPGPGNGWFYVEAVIDRQTGGPGPGVVTIPNSVQISVGYMGPGPGIHFLQGAIISFVNSNGPGPGEKQRTKFLNTVAIPDGPGPGVHEGIRTYFVQFKDDGPGPGIEFITFLGALKSFLKGPGPGGNKDNCMTYVAWDSVGPGPGPEWIQRQTVLQHSFNGPGPGSDEISFAGIVTKLPTGPGPGYENDSTDLRDHIDYWGPGPGPINISKSKAHKAIELGPGPGPEWIERQTVLQHSFN

SEQ ID NO: 3519 - protein, 902 aa, Human papillomavirus
MGMQVQIQSLFLLLLWVPGSRGQVDYYGLYYNAAASTVSVGTAKNVAWDSVYYMKAALTYDSEWQRNAAAKFVAAWTLKAAAKAIFGVNPTVKAAALLQQYCLYLNYYMTDAGTWNAVTYNSEVQRNAALQDKILDHYKAAAPYLHSRLVVFNAAATCVSHRGLYTLYAHIQCLNTMHYTNWKNAFLQGSVICFVKAAVMDDSEIAYNAAKSAIVTLTYKVFTFPNPFPFNSTAAALYWYKKAAAKLLEKLLCINGYNTFYIEFKAAAVMCRHYKRNHYTNWTHIYGAAAILYAHIQCLNAAARQMNMSQWIKNAAYTNWKFIYLNACQDKILEHYKISFAGIVTKKYYITETGIWKSSVAALYWYNAAASYFGMSFIHFKAAALYGVSFSELKAAQVVPAYNISKNYVVWDSIYYINAFIQGAVISFVKAAVFTFPHAFPFGAAAVFTFPNEFPFGAAALQDKIIDHYKAAYLCIDGQCTVKARLECAIYYKNATVSATQLVKNMSMSQWIKYNHYTNWKFIYNAATTPIIHLKNAMLETLNNTEYGAAAVFEFPNAFPFKAATLQDVSLEVNTGILTVTYGAAAVHEGIRTYFVQFKDDGPGPGVVTIPNSVQISVGYMGPGPGPEWIERQTVLQHSFNGPGPGEKQRTKFLNTVAIPDGPGPGPEWIQRQTVLQHSFNGPGPGFKTLIQPFILYAHIQGPGPGGNKDNCMTYVAWDSVGPGPGNGWFYVEAVIDRQTGGPGPGYENDSTDLRDHIDYWGPGPGIHFLQGAIISFVNSNGPGPGPINISKSKAHKAIELGPGPGLYWYKTGISNISEVYGPGPGSDEISFAGIVTKLPTGPGPGKHIRLLECVLMYKAREGPGPGIEFITFLGALKSFLKGPGPGKVAMLDDATHTCWTY

SEQ ID NO: 3520 - DNA, 2445 bp, Human papillomavirus; identical to SEQ ID NO: 3108

SEQ ID NO: 3521 - protein, 782 aa, Human papillomavirus; identical to SEQ ID NO: 3112

SEQ ID NO: 3522 - protein, 586 aa, Human papillomavirus
MGMQVQIQSLFLLLLWVPGSRGQVDYYGLYYNAAASTVSVGTAKNVAWDSVYYMKAKFVAAWTLKAAAKSLFGMSLMKGAAAIFGVNPTVKAAALLQQYCLYLNYYMTDAGTWNAVTYNSEVQRNAALQDKILDHYKAAAPYLHSRLVVFNAAATCVSHRGLYTLYAHIQCLNTMHYTNWKNAFLQGSVICFVKAAVMDDSEIAYNAAKSAIVTLTYKVFTFPNPFPFNSTAAALYWYKKAAAKLLEKLLCINGYNTFYIEFKAAAVMCRHYKRNHYTNWTHIYGAAAILYAHIQCLNAAARQMNMSQWIKNAAYTNWKFIYLNACQDKILEHYKISFAGIVTKKYYITETGIWKSSVAALYWYNAAASYFGMSFIHFKAAALYGVSFSELKAAQVVPAYNISKNYVVWDSIYYINAFIQGAVISFVKAAVFTFPHAFPFGAAAVFTFPNEFPFGAAALQDKIIDHYKAAYLCIDGQCTVKSVICFVNSKNAKQGAMLAVFKKAAMSMSQWIKYNHYTNWKFIYNAATTPIIHLKNAMLETLNNTEYGAAAVFEFPNAFPFKAAKLLSKLLCVNTGILTVTYGAAA

SEQ ID NO: 3523 - protein, 897 aa, Human papillomavirus
MGMQVQIQSLFLLLLWVPGSRGTLHDIILECVKHTDTPTLHEYNVSDFRWYRYKRFHNIRGRWKFYSRIRELRFKAARTEVYQFAFRNASVYGDTLEKVKAAALYNLLIRCFKAAAIVYRDCIAYVKDSVYGDTLERGYMLDLQPETVNASVYGETLERNKVSEFRWYRYKRYSVYGTTLKAAAAVCDKCLKFRKAKLTNKGICDLNTFCCKCDSTFKAAYSDIRELRHYKAAALTDVSIACVYGAAYVLDLYPEPVNAIVYRDCIAYNAAAHTMLCMCCRNAAAFYSKVSEFRWKAAKLYSKISEYRKFYSKISEFKAATLGIVCPVNAALTDIEITCVYKQTEPDTSNYGAASLQDIEITCVKLPDLCTELNAAAATLERTEVYGAAALLIRCINCQKKAVYGTTLEKLKAAASVYGTTLERGRFHNIAGHFKYSKISEYRHYKAATLEKLTNTGLYGAAELDPVDLLCYKLSSALEIPYKAAAVYCKTVLEFKAASLQDVSIACVKFVVYRDSIPKNISDYRHYCYKWTGRCIACWKKAKFVAAWTLKAAAKAAAVYQFAFKDLKKLTNTGLYNVGAAALDLQPETTDLYCYEQGPGPGTGRCIACWRRPRTETGPGPGTNTGLYNLLIRCLRCGPGPGEIVLHLEPQNELDPVGPGPGQERPRKLPQLCTELQGPGPGEVFEFAFKDLFVVYRGPGPGFHSIAGQYRGQCNTCGPGPGVIDSPAGQAEPDTSNGPGPGQRFHNIRGRWTGRCMGPGPGVLDFAFTDLTIVYRDGPGPGMFKNPAERPRKLHELGPGPGIRTLEDLLMGTLGIVGPGPGEDLRTLQQLFLSTLSGPGPGSADDLRAFQQLFLNTGPGPGWYRYSVYGTTLEKLTGPGPGEPDRAHYNIVTFCCK

SEQ ID NO: 3524 - DNA, 2712 bp, Human papillomavirus
aaactgcaggccgccaccatgggcatgcaggtgcagatccagagcctgttcctgctcctgctgtgggtgccaggaagcagaggcaccctgcatgatattattctggagtgcgtcaaacacacagacacacccaccctgcacgagtataacgtctctgactttaggtggtacaggtacaaaagatttcacaatatcagaggaaggtggaagttctattcccgcattagggaactgaggttcaaggctgcccgcactgaggtctatcaatttgcatttcggaatgcctctgtgtacggcgacaccctggagaaggtgaaagccgccgccctctacaatctgctcatccgctgtttcaaagctgccgcaattgtgtaccgggattgcatcgcttacgtgaaggattccgtgtatggagacaccctcgagcgcggctacatgctggatctccagccagagacagtgaacgccagcgtgtacggagagactctggaacggaataaggtgtctgagtttagatggtataggtacaagaggtactccgtgtacggcacgacgctcaaagccgcagccgcagtctgtgacaaatgcctcaagtttagaaaggctaagctcactaacaagggcatctgcgacctcaataccttttgttgtaagtgcgacagcacctttaaggccgcctacagcgatattcgcgagctgcggcactacaaggccgccgccctgaccgacgtgtctattgcctgcgtctacggggccgcatatgtgctcgacctctaccccgagcctgtcaacgcaatcgtgtatcgcgattgtatcgcatacaatgctgccgcccacaccatgctgtgcatgtgttgcagaaatgcagcggccttctactccaaggtctctgaattcagatggaaggccgctaagctgtattctaagatctccgagtatcgcaagttctattctaaaatcagcgagttcaaagctgccacactgggcattgtgtgccccgtgaacgccgctctgacagatatcgagatcacctgcgtgtacaaacagaccgagcccgataccagcaactacggagccgcctccctccaagacattgaaatcacttgtgtgaagctccccgatctctgtacagaactgaacgctgccgcagccaccctggagcggaccgaggtgtacggggccgccgcactcctgatcaggtgtattaactgtcagaagaaggccgtctacggcaccaccctggagaaattgaaggccgccgctagcgtctatgggacgactctggaaaggggaagattccataacatcgccgggcatttcaaatattccaagatctccgaataccggcactacaaggcagcgaccctggagaaactgaccaacaccgggctgtatggagcggcagaactggacccggtggacctgctgtgttataagctgagcagcgccctggagattccatataaggcggctgccgtgtactgcaaaaccgtcctggagttcaaagctgcgagcctccaggacgtctccattgcctgtgtgaaattcgtggtctaccgggactctatccctaagaacatcagcgattaccggcattactgctataagtggactggcagatgcatcgcctgttggaagaaagctaagttcgtcgctgcatggactctcaaagccgcggccaaggcagccgctgtgtatcagtttgcgttcaaagatctgaagaagctgacgaatacaggcctctataacgtgggcgcggccgccctggacctgcagcctgagacaaccgatctgtactgctatgagcagggcccaggacccgggaccggcaggtgtatcgcctgctggagacggcctaggacagagaccggaccagggcccggcacaaataccggactgtacaatctgctcatcagatgtctgaggtgcgggcccggccctggagagattgtgctgcacctggagccacagaacgagctggaccccgtggggcctggcccaggacaggagaggcccagaaagctgcctcagctgtgcaccgagctgcagggaccaggccccggtgaggtgttcgaatttgccttcaaggatctgtttgtggtctacagggggcctggcccaggattccacagcatcgctgggcagtatagaggccagtgcaacacctgtggacctggtcccggggtgatcgactccccagccggccaggctgagcctgacacaagcaacgggcccggccctgggcagagattccacaacatcaggggcagatggaccgggcggtgcatgggcccagggcccggagtgctggactttgccttcactgatctgaccattgtgtacagggacgggcctggaccaggcatgttcaagaaccccgccgagagacctcggaagctgcacgagctgggcccaggacctggcatcagaacactggaggatctgctcatgggcaccctgggaatcgtgggtcccggcccaggagaggacctgaggactctgcagcaactgtttctcagcaccctgtccggccctggacccggcagcgctgacgatctgagagccttccagcagctgttcctcaatacagggccaggacctggctggtacaggtattccgtgtacgggaccactctggagaaactgaccggacccggcccaggggagcctgacagagcccactacaacatcgtgacattctgctgtaagtga

SEQ ID NO: 3525 - protein, 902 aa, Human papillomavirus
MGMQVQIQSLFLLLLWVPGSRGTLHDIILECVKHTDTPTLHEYNVSDFRWYRYKRFHNIRGRWKFYSRIRELRFKAARTEVYQFAFRNASVYGDTLEKVKAAALYNLLIRCFKAAAIVYRDCIAYVKDSVYGDTLERGYMLDLQPETVNASVYGETLERNKVSEFRWYRYKRYSVYGTTLKAAAAVCDKCLKFRKAKLTNKGICDLNTFCCKCDSTFKAAYSDIRELRHYKAAALTDVSIACVYGAAYVLDLYPEPVNAIVYRDCIAYNAAAHTMLCMCCRNAAAFYSKVSEFRWKAAKLYSKISEYRKFYSKISEFKAATLGIVCPVNAALTDIEITCVYKQTEPDTSNYGAASLQDIEITCVKLPDLCTELNAAAATLERTEVYGAAALLIRCINCQKKAVYGTTLEKLKAAASVYGTTLERGRFHNIAGHFKYSKISEYRHYKAATLEKLTNTGLYGAAELDPVDLLCYKLSSALEIPYKAAAVYCKTVLEFKAASLQDVSIACVKFVVYRDSIPKNISDYRHYCYKWTGRCIACWKKAKFVAAWTLKAAAKAAAVYQFAFKDLKKLTNTGLYNVGAAAGPGPGLDLQPETTDLYCYEQGPGPGTGRCIACWRRPRTETGPGPGTNTGLYNLLIRCLRCGPGPGEIVLHLEPQNELDPVGPGPGQERPRKLPQLCTELQGPGPGEVFEFAFKDLFVVYRGPGPGFHSIAGQYRGQCNTCGPGPGVIDSPAGQAEPDTSNGPGPGQRFHNIRGRWTGRCMGPGPGVLDFAFTDLTIVYRDGPGPGMFKNPAERPRKLHELGPGPGIRTLEDLLMGTLGIVGPGPGEDLRTLQQLFLSTLSGPGPGSADDLRAFQQLFLNTGPGPGWYRYSVYGTTLEKLTGPGPGEPDRAHYNIVTFCCK

SEQ ID NO: 3526 - DNA, 2736 bp, Human papillomavirus
aaactgcaggccgccaccatgggcatgcaggtgcagatccagagcctgttcctgctcctgctgtgggtgccaggaagcagaggcaccctgcatgatattattctggagtgcgtcaaacacacagacacacccaccctgcacgagtataacgtctctgactttaggtggtacaggtacaaaagatttcacaatatcagaggaaggtggaagttctattcccgcattagggaactgaggttcaaggctgcccgcactgaggtctatcaatttgcatttcggaatgcctctgtgtacggcgacaccctggagaaggtgaaagccgccgccctctacaatctgctcatccgctgtttcaaagctgccgcaattgtgtaccgggattgcatcgcttacgtgaaggattccgtgtatggagacaccctcgagcgcggctacatgctggatctccagccagagacagtgaacgccagcgtgtacggagagactctggaacggaataaggtgtctgagtttagatggtataggtacaagaggtactccgtgtacggcacgacgctcaaagccgcagccgcagtctgtgacaaatgcctcaagtttagaaaggctaagctcactaacaagggcatctgcgacctcaataccttttgttgtaagtgcgacagcacctttaaggccgcctacagcgatattcgcgagctgcggcactacaaggccgccgccctgaccgacgtgtctattgcctgcgtctacggggccgcatatgtgctcgacctctaccccgagcctgtcaacgcaatcgtgtatcgcgattgtatcgcatacaatgctgccgcccacaccatgctgtgcatgtgttgcagaaatgcagcggccttctactccaaggtctctgaattcagatggaaggccgctaagctgtattctaagatctccgagtatcgcaagttctattctaaaatcagcgagttcaaagctgccacactgggcattgtgtgccccgtgaacgccgctctgacagatatcgagatcacctgcgtgtacaaacagaccgagcccgataccagcaactacggagccgcctccctccaagacattgaaatcacttgtgtgaagctccccgatctctgtacagaactgaacgctgccgcagccaccctggagcggaccgaggtgtacggggccgccgcactcctgatcaggtgtattaactgtcagaagaaggccgtctacggcaccaccctggagaaattgaaggccgccgctagcgtctatgggacgactctggaaaggggaagattccataacatcgccgggcatttcaaatattccaagatctccgaataccggcactacaaggcagcgaccctggagaaactgaccaacaccgggctgtatggagcggcagaactggacccggtggacctgctgtgttataagctgagcagcgccctggagattccatataaggcggctgccgtgtactgcaaaaccgtcctggagttcaaagctgcgagcctccaggacgtctccattgcctgtgtgaaattcgtggtctaccgggactctatccctaagaacatcagcgattaccggcattactgctataagtggactggcagatgcatcgcctgttggaagaaagctaagttcgtcgctgcatggactctcaaagccgcggccaaggcagccgctgtgtatcagtttgcgttcaaagatctgaagaagctgacgaatacaggcctctataacgtgggcgcggccgccggccctggacccgggctggacctgcagcctgagacaaccgatctgtactgctatgagcagggcccaggacccgggaccggcaggtgtatcgcctgctggagacggcctaggacagagaccggaccagggcccggcacaaataccggactgtacaatctgctcatcagatgtctgaggtgcgggcccggccctggagagattgtgctgcacctggagccacagaacgagctggaccccgtggggcctggcccaggacaggagaggcccagaaagctgcctcagctgtgcaccgagctgcagggaccaggccccggtgaggtgttcgaatttgccttcaaggatctgtttgtggtctacagggggcctggcccaggattccacagcatcgctgggcagtatagaggccagtgcaacacctgtggacctggtcccggggtgatcgactccccagccggccaggctgagcctgacacaagcaacgggcccggccctgggcagagattccacaacatcaggggcagatggaccgggcggtgcatgggcccagggcccggagtgctggactttgccttcactgatctgaccattgtgtacagggacgggcctggaccaggcatgttcaagaaccccgccgagagacctcggaagctgcacgagctgggcccaggacctggcatcagaacactggaggatctgctcatgggcaccctgggaatcgtgggtcccggcccaggagaggacctgaggactctgcagcaactgtttctcagcaccctgtccggccctggacccggcagcgctgacgatctgagagccttccagcagctgttcctcaatacagggccaggacctggctggtacaggtattccgtgtacgggaccactctggagaaactgaccggacccggcccaggggagcctgacagagcccactacaacatcgtgacattctgctgtaagtgataaggatcc

SEQ ID NO: 3527 - protein, 905 aa, Human papillomavirus
MGMQVQIQSLFLLLLWVPGSRGTLHDIILECVKHTDTPTLHEYNAAACYSLYGTTLKAAAVSDFRWYRYKFYSRIRELRFKAARTEVYQFAFRNASVYGDTLEKVKAAALYNLLIRCFKAAAIVYRDCIAYVKDSVYGDTLERGYMLDLQPETVNASVYGETLERNKVSEFRWYRYKRYSVYGTTLKAAAAVCDKCLKFRKAKLTNKGICDLNTFCCKCDSTFKAAYSDIRELRHYKAAALTDVSIACVYGAAYVLDLYPEPVNAIVYRDCIAYNAAAHTMLCMCCRNAAARFYSKVSEFRWKAAKLYSKISEYRKFYSKISEFKAATLGIVCPVNAALTDIEITCVYKQTEPDTSNYGAASLQDIEITCVKLPDLCTELNAAAATLERTEVYGAAALLIRCINCQKKAVYGTTLEKLKAAASVYGTTLERNVFEFAFKDLFKYSKISEYRHYKAATLEKLTNTGLYGAAELDPVDLLCYKLSSALEIPYKAAAVYCKTVLELKAASLQDVSIACVKFVVYRDSIPKNISDYRHYCYKWTGRCIACWKKAKFVAAWTLKAAAKAAAVYQFAFKDLKKLTNTGLYNVGAAALDLQPETTDLYCYEQGPGPGTGRCIACWRRPRTETGPGPGTNTGLYNLLIRCLRCGPGPGEIVLHLEPQNELDPVGPGPGQERPRKLPQLCTELQGPGPGEVFEFAFKDLFVVYRGPGPGFHSIAGQYRGQCNTCGPGPGVIDSPAGQAEPDTSNGPGPGQRFHNIRGRWTGRCMGPGPGVLDFAFTDLTIVYRDGPGPGMFKNPAERPRKLHELGPGPGIRTLEDLLMGTLGIVGPGPGEDLRTLQQLFLSTLSGPGPGSADDLRAFQQLFLNTGPGPGWYRYSVYGTTLEKLTGPGPGEPDRAHYNIVTFCCK

SEQ ID NO: 3528 - DNA, 2754 bp, Human papillomavirus
tcctgcagaattcaggaggccgccaccatgggcatgcaggtgcagatccagagcctgttcctgctcctgctgtgggtgccaggaagcagaggcaccctgcatgatattattctggagtgcgtcaaacacacagacacacccaccctgcacgagtataacgccgctgcctgctactccctgtacggcaccacactcaaggccgcagctgtctctgactttaggtggtacaggtacaagttctattcccgcattagggaactgaggttcaaggctgcccgcactgaggtctatcaatttgcatttcggaatgcctctgtgtacggcgacaccctggagaaggtgaaagccgccgccctctacaatctgctcatccgctgtttcaaagctgccgcaattgtgtaccgggattgcatcgcttacgtgaaggattccgtgtatggagacaccctcgagcgcggctacatgctggatctccagccagagacagtgaacgccagcgtgtacggagagactctggaacggaataaggtgtctgagtttagatggtataggtacaagaggtactccgtgtacggcacgacgctcaaagccgcagccgcagtctgtgacaaatgcctcaagtttagaaaggctaagctcactaacaagggcatctgcgacctcaataccttttgttgtaagtgcgacagcacctttaaggccgcctacagcgatattcgcgagctgcggcactacaaggccgccgccctgaccgacgtgtctattgcctgcgtctacggggccgcatatgtgctcgacctctaccccgagcctgtcaacgcaatcgtgtatcgcgattgtatcgcatacaatgctgccgcccacaccatgctgtgcatgtgttgcagaaatgcagcggccaggttctactccaaggtctctgaattcagatggaaggccgctaagctgtattctaagatctccgagtatcgcaagttctattctaaaatcagcgagttcaaagctgccacactgggcattgtgtgccccgtgaacgccgctctgacagatatcgagatcacctgcgtgtacaaacagaccgagcccgataccagcaactacggagccgcctccctccaagacattgaaatcacttgtgtgaagctccccgatctctgtacagaactgaacgctgccgcagccaccctggagcggaccgaggtgtacggggccgccgcactcctgatcaggtgtattaactgtcagaagaaggccgtctacggcaccaccctggagaaattgaaggccgccgctagcgtctatgggacgactctggaaaggaacgtgttcgagtttgccttcaaggacctgttcaaatattccaagatctccgaataccggcactacaaggcagcgaccctggagaaactgaccaacaccgggctgtatggagcggcagaactggacccggtggacctgctgtgttataagctgagcagcgccctggagattccatataaggcggctgccgtgtactgcaaaaccgtcctggagctcaaagctgcgagcctccaggacgtctccattgcctgtgtgaaattcgtggtctaccgggactctatccctaagaacatcagcgattaccggcattactgctataagtggactggcagatgcatcgcctgttggaagaaagctaagttcgtcgctgcatggactctcaaagccgcggccaaggcagccgctgtgtatcagtttgcgttcaaagatctgaagaagctgacgaatacaggcctctataacgtgggagcggccgccctggacctgcagcctgagacaaccgatctgtactgctatgagcagggcccaggacccgggaccggcaggtgtatcgcctgctggagacggcctaggacagagaccggaccagggcccggcacaaataccggactgtacaatctgctcatcagatgtctgaggtgcgggcccggccctggagagattgtgctgcacctggagccacagaacgagctggaccccgtggggcctggcccaggacaggagaggcccagaaagctgcctcagctgtgcaccgagctgcagggaccaggccccggtgaggtgttcgaatttgccttcaaggatctgtttgtggtctacagggggcctggcccaggattccacagcatcgctgggcagtatagaggccagtgcaacacctgtggacctggtcccggggtgatcgactccccagccggccaggctgagcctgacacaagcaacgggcccggccctgggcagagattccacaacatcaggggcagatggaccgggcggtgcatgggcccagggcccggagtgctggactttgccttcactgatctgaccattgtgtacagggacgggcctggaccaggcatgttcaagaaccccgccgagagacctcggaagctgcacgagctgggcccaggacctggcatcagaacactggaggatctgctcatgggcaccctgggaatcgtgggtcccggcccaggagaggacctgaggactctgcagcaactgtttctcagcaccctgtccggccctggacccggcagcgctgacgatctgagagccttccagcagctgttcctcaatacagggccaggacctggctggtacaggtattccgtgtacgggaccactctggagaaactgaccggacccggcccaggggagcctgacagagcccactacaacatcgtgacattctgctgtaagtgataaggatcc

SEQ ID NO: 3529 - protein, 910 aa, Human papillomavirus
MGMQVQIQSLFLLLLWVPGSRGTLHDIILECVKHTDTPTLHEYNAAACYSLYGTTLKAAAVSDFRWYRYKFYSRIRELRFKAARTEVYQFAFRNASVYGDTLEKVKAAALYNLLIRCFKAAAIVYRDCIAYVKDSVYGDTLERGYMLDLQPETVNASVYGETLERNKVSEFRWYRYKRYSVYGTTLKAAAAVCDKCLKFRKAKLTNKGICDLNTFCCKCDSTFKAAYSDIRELRHYKAAALTDVSIACVYGAAYVLDLYPEPVNAIVYRDCIAYNAAAHTMLCMCCRNAAARFYSKVSEFRWKAAKLYSKISEYRKFYSKISEFKAATLGIVCPVNAALTDIEITCVYKQTEPDTSNYGAASLQDIEITCVKLPDLCTELNAAAATLERTEVYGAAALLIRCINCQKKAVYGTTLEKLKAAASVYGTTLERNVFEFAFKDLFKYSKISEYRHYKAATLEKLTNTGLYGAAELDPVDLLCYKLSSALEIPYKAAAVYCKTVLELKAASLQDVSIACVKFVVYRDSIPKNISDYRHYCYKWTGRCIACWKKAKFVAAWTLKAAAKAAAVYQFAFKDLKKLTNTGLYNVGAAAGPGPGLDLQPETTDLYCYEQGPGPGTGRCIACWRRPRTETGPGPGTNTGLYNLLIRCLRCGPGPGEIVLHLEPQNELDPVGPGPGQERPRKLPQLCTELQGPGPGEVFEFAFKDLFVVYRGPGPGFHSIAGQYRGQCNTCGPGPGVIDSPAGQAEPDTSNGPGPGQRFHNIRGRWTGRCMGPGPGVLDFAFTDLTIVYRDGPGPGMFKNPAERPRKLHELGPGPGIRTLEDLLMGTLGIVGPGPGEDLRTLQQLFLSTLSGPGPGSADDLRAFQQLFLNTGPGPGWYRYSVYGTTLEKLTGPGPGEPDRAHYNIVTFCCK

SEQ ID NO: 3530 - DNA, 2769 bp, Human papillomavirus
tcctgcagaattcaggaggccgccaccatgggcatgcaggtgcagatccagagcctgttcctgctcctgctgtgggtgccaggaagcagaggcaccctgcatgatattattctggagtgcgtcaaacacacagacacacccaccctgcacgagtataacgccgctgcctgctactccctgtacggcaccacactcaaggccgcagctgtctctgactttaggtggtacaggtacaagttctattcccgcattagggaactgaggttcaaggctgcccgcactgaggtctatcaatttgcatttcggaatgcctctgtgtacggcgacaccctggagaaggtgaaagccgccgccctctacaatctgctcatccgctgtttcaaagctgccgcaattgtgtaccgggattgcatcgcttacgtgaaggattccgtgtatggagacaccctcgagcgcggctacatgctggatctccagccagagacagtgaacgccagcgtgtacggagagactctggaacggaataaggtgtctgagtttagatggtataggtacaagaggtactccgtgtacggcacgacgctcaaagccgcagccgcagtctgtgacaaatgcctcaagtttagaaaggctaagctcactaacaagggcatctgcgacctcaataccttttgttgtaagtgcgacagcacctttaaggccgcctacagcgatattcgcgagctgcggcactacaaggccgccgccctgaccgacgtgtctattgcctgcgtctacggggccgcatatgtgctcgacctctaccccgagcctgtcaacgcaatcgtgtatcgcgattgtatcgcatacaatgctgccgcccacaccatgctgtgcatgtgttgcagaaatgcagcggccaggttctactccaaggtctctgaattcagatggaaggccgctaagctgtattctaagatctccgagtatcgcaagttctattctaaaatcagcgagttcaaagctgccacactgggcattgtgtgccccgtgaacgccgctctgacagatatcgagatcacctgcgtgtacaaacagaccgagcccgataccagcaactacggagccgcctccctccaagacattgaaatcacttgtgtgaagctccccgatctctgtacagaactgaacgctgccgcagccaccctggagcggaccgaggtgtacggggccgccgcactcctgatcaggtgtattaactgtcagaagaaggccgtctacggcaccaccctggagaaattgaaggccgccgctagcgtctatgggacgactctggaaaggaacgtgttcgagtttgccttcaaggacctgttcaaatattccaagatctccgaataccggcactacaaggcagcgaccctggagaaactgaccaacaccgggctgtatggagcggcagaactggacccggtggacctgctgtgttataagctgagcagcgccctggagattccatataaggcggctgccgtgtactgcaaaaccgtcctggagctcaaagctgcgagcctccaggacgtctccattgcctgtgtgaaattcgtggtctaccgggactctatccctaagaacatcagcgattaccggcattactgctataagtggactggcagatgcatcgcctgttggaagaaagctaagttcgtcgctgcatggactctcaaagccgcggccaaggcagccgctgtgtatcagtttgcgttcaaagatctgaagaagctgacgaatacaggcctctataacgtgggagcggccgccggccctggacccgggctggacctgcagcctgagacaaccgatctgtactgctatgagcagggcccaggacccgggaccggcaggtgtatcgcctgctggagacggcctaggacagagaccggaccagggcccggcacaaataccggactgtacaatctgctcatcagatgtctgaggtgcgggcccggccctggagagattgtgctgcacctggagccacagaacgagctggaccccgtggggcctggcccaggacaggagaggcccagaaagctgcctcagctgtgcaccgagctgcagggaccaggccccggtgaggtgttcgaatttgccttcaaggatctgtttgtggtctacagggggcctggcccaggattccacagcatcgctgggcagtatagaggccagtgcaacacctgtggacctggtcccggggtgatcgactccccagccggccaggctgagcctgacacaagcaacgggcccggccctgggcagagattccacaacatcaggggcagatggaccgggcggtgcatgggcccagggcccggagtgctggactttgccttcactgatctgaccattgtgtacagggacgggcctggaccaggcatgttcaagaaccccgccgagagacctcggaagctgcacgagctgggcccaggacctggcatcagaacactggaggatctgctcatgggcaccctgggaatcgtgggtcccggcccaggagaggacctgaggactctgcagcaactgtttctcagcaccctgtccggccctggacccggcagcgctgacgatctgagagccttccagcagctgttcctcaatacagggccaggacctggctggtacaggtattccgtgtacgggaccactctggagaaactgaccggacccggcccaggggagcctgacagagcccactacaacatcgtgacattctgctgtaagtgataaggatcc

SEQ ID NO: 3531 - protein, 586 aa, Human papillomavirus
MGMQVQIQSLFLLLLWVPGSRGTLHDIILECVKHTDTPTLHEYNAAACYSLYGTTLKAAAVSDFRWYRYKFYSRIRELRFKAARTEVYQFAFRNASVYGDTLEKVKAAALYNLLIRCFKAAAIVYRDCIAYVKDSVYGDTLERGYMLDLQPETVNASVYGETLERNKVSEFRWYRYKRYSVYGTTLKAAAAVCDKCLKFRKAKLTNKGICDLNTFCCKCDSTFKAAYSDIRELRHYKAAALTDVSIACVYGAAYVLDLYPEPVNAIVYRDCIAYNAAAHTMLCMCCRNAAARFYSKVSEFRWKAAKLYSKISEYRKFYSKISEFKAATLGIVCPVNAALTDIEITCVYKQTEPDTSNYGAASLQDIEITCVKLPDLCTELNAAAATLERTEVYGAAALLIRCINCQKKAVYGTTLEKLKAAASVYGTTLERNVFEFAFKDLFKYSKISEYRHYKAATLEKLTNTGLYGAAELDPVDLLCYKLSSALEIPYKAAAVYCKTVLELKAASLQDVSIACVKFVVYRDSIPKNISDYRHYCYKWTGRCIACWKKAKFVAAWTLKAAAKAAAVYQFAFKDLKKLTNTGLYNV

SEQ ID NO: 3532 - DNA, 1806 bp, Human papillomavirus
tcctgcagaattcaggaggccgccaccatgggcatgcaggtgcagatccagagcctgttcctgctcctgctgtgggtgccaggaagcagaggcaccctgcatgatattattctggagtgcgtcaaacacacagacacacccaccctgcacgagtataacgccgctgcctgctactccctgtacggcaccacactcaaggccgcagctgtctctgactttaggtggtacaggtacaagttctattcccgcattagggaactgaggttcaaggctgcccgcactgaggtctatcaatttgcatttcggaatgcctctgtgtacggcgacaccctggagaaggtgaaagccgccgccctctacaatctgctcatccgctgtttcaaagctgccgcaattgtgtaccgggattgcatcgcttacgtgaaggattccgtgtatggagacaccctcgagcgcggctacatgctggatctccagccagagacagtgaacgccagcgtgtacggagagactctggaacggaataaggtgtctgagtttagatggtataggtacaagaggtactccgtgtacggcacgacgctcaaagccgcagccgcagtctgtgacaaatgcctcaagtttagaaaggctaagctcactaacaagggcatctgcgacctcaataccttttgttgtaagtgcgacagcacctttaaggccgcctacagcgatattcgcgagctgcggcactacaaggccgccgccctgaccgacgtgtctattgcctgcgtctacggggccgcatatgtgctcgacctctaccccgagcctgtcaacgcaatcgtgtatcgcgattgtatcgcatacaatgctgccgcccacaccatgctgtgcatgtgttgcagaaatgcagcggccaggttctactccaaggtctctgaattcagatggaaggccgctaagctgtattctaagatctccgagtatcgcaagttctattctaaaatcagcgagttcaaagctgccacactgggcattgtgtgccccgtgaacgccgctctgacagatatcgagatcacctgcgtgtacaaacagaccgagcccgataccagcaactacggagccgcctccctccaagacattgaaatcacttgtgtgaagctccccgatctctgtacagaactgaacgctgccgcagccaccctggagcggaccgaggtgtacggggccgccgcactcctgatcaggtgtattaactgtcagaagaaggccgtctacggcaccaccctggagaaattgaaggccgccgctagcgtctatgggacgactctggaaaggaacgtgttcgagtttgccttcaaggacctgttcaaatattccaagatctccgaataccggcactacaaggcagcgaccctggagaaactgaccaacaccgggctgtatggagcggcagaactggacccggtggacctgctgtgttataagctgagcagcgccctggagattccatataaggcggctgccgtgtactgcaaaaccgtcctggagctcaaagctgcgagcctccaggacgtctccattgcctgtgtgaaattcgtggtctaccgggactctatccctaagaacatcagcgattaccggcattactgctataagtggactggcagatgcatcgcctgttggaagaaagctaagttcgtcgctgcatggactctcaaagccgcggccaaggcagccgctgtgtatcagtttgcgttcaaagatctgaagaagctgacgaatacaggcctctataacgtgggagcggccgcctgaggtacc

SEQ ID NO: 3533 - protein, 586 aa, Human papillomavirus
MGMQVQIQSLFLLLLWVPGSRGVFTFPHAFPFNASYFGMSLISFKAAALQDKILDHYKQGAMLAVFKKAALLQQYCLYLNAALTNILNVLKNAAACQDKILEHYKAAAILYAHIQCLNSLMKFLQGSVGKLFLKGVPKNAHYTNWTHIYGAAAVMDDSEIAYNSTAAALYWYKKAFLGALKSFLNAAAYYITETGIWKAATLYAHIQCLNAMLETLNNTEYNAGYNTFYIEFKAAALLRYKCGKNAVMCRHYKRNSLMKFLQGSVNAAATCVSHRGLYNAHYTNWKFIYGAAAMSMSQWIKYNAATTPIIHLKNAVAWDSVYYMKAYLCIDGQCTVKYVVWDSIYYINAAASTVSVGTAKNSSVAALYWYNAAASYFGMSFIHFKAAAVFEFPNAFPFKAAAVFTFPNEFPFNAAARQMNMSQWIKNAQVDYYGLYYNAAKSAIVTLTYKAAAIFGVNPTVKAALYGVSFSELKLLEKLLCINAVFTFPNPFPFNAAAYYMTDAGTWNAVTYNSEVQRNAAAATMCRHYKRNTGILTVTYNISFAGIVTKKAAALQDKIIDHYKAKFVAAWTLKAAAKLLSKLLCV

SEQ ID NO: 3534 - DNA, 1800 bp, Human papillomavirus
aaactgcaggccgccaccatgggcatgcaggtgcagatccagagcctgttcctgctcctgctgtgggtgccaggaagcagaggcgtgttcacattcccacatgccttcccttttaatgcaagctatttcgggatgtccctgatcagcttcaaggccgccgctctccaggacaagatcctcgaccattacaagcaaggagccatgctggcagtgttcaagaaggcagccctgctccagcaatactgcctgtatctgaatgccgccctcacaaacatcctgaatgtcctgaagaatgccgctgcctgtcaggataagattctggagcactataaggccgcagctattctgtacgcacatatccagtgcctcaacagtctgatgaaatttctccaaggcagcgtgggaaagctgttcctgaagggcgtgcccaagaacgctcactacacaaattggacccatatctacggcgccgccgctgtgatggacgactccgagatcgcttacaactccaccgccgccgctctgtattggtacaagaaggccttcctgggcgctctcaagtcctttctcaatgccgctgcatactatattaccgagacaggaatctggaaggccgctaccctgtacgctcacatccaatgtctcaacgcaatgctcgagacactcaacaataccgaatacaatgccggatacaacacattctatatcgagttcaaagctgccgccctgctgcggtacaagtgcgggaagaatgcagtgatgtgcaggcattacaagaggaacagcctgatgaagtttctccagggcagcgtcaacgccgcagcaacctgcgtctcccaccgcggactctacaacgcacactacaccaactggaagttcatctatggagccgcagctatgagcatgtctcagtggatcaagtacaatgctgcaactacacctattattcacctgaagaacgccgtggcatgggactccgtgtactacatgaaagcctatctgtgcatcgatggccagtgcactgtgaagtatgtggtctgggacagcatctactatatcaacgcagctgcctccacagtctctgtcggcactgccaagaactctagcgtcgctgccctgtattggtacaacgctgctgcctcttacttcggcatgagcttcatccattttaaagcagccgcagtgttcgaatttccaaatgcctttccattcaaggctgccgcagtgtttactttccccaacgagttcccctttaatgctgctgcccggcagatgaacatgtcccagtggatcaagaatgcacaggtggattactacggcctgtattataacgccgctaagtctgccattgtgaccctcacttataaggctgccgccatcttcggggtgaatccaaccgtgaaagccgcactctatggggtcagcttctctgagctgaaactgctggagaaactcctgtgtatcaacgccgtcttcacctttcctaatccctttcctttcaatgctgctgcctattacatgaccgacgctggaacttggaacgctgtgacttataactccgaggtccagcgcaacgccgcagcagccacaatgtgtagacactacaagagaaataccggcattctgactgtgacatacaacatttcctttgccggcatcgtgaccaagaaggccgccgctctccaggataagattattgatcactataaggccaagttcgtggctgcctggaccctgaaggctgccgctaaactgctctctaaactgctgtgtgtgaaggcggccgcctgaggatccgcg

SEQ ID NO: 3535 - protein, 583 aa, Human papillomavirus
MGMQVQIQSLFLLLLWVPGSRGLQDKIIDHYKVTYNSEVQRNISFAGIVTKKLYGVSFSELKLLSKLLCVNAVFTFPNPFPFNAAKSAIVTLTYKAAATMCRHYKRNAAAYYMTDAGTWNAAIFGVNPTVKAAAKFVAAWTLKAAAKLLEKLLCINTGILTVTYGAAAQVDYYGLYYNASYFGMSFIHFKAAYLCIDGQCTVKATTPIIHLKNVFEFPNAFPFKAAAVAWDSVYYMKAYVVWDSIYYINAAARQMNMSQWIKNAAVFTFPNEFPFNAAASSVAALYWYNAAASTVSVGTAKNMSMSQWIKYGAATLYAHIQCLNVMDDSEIAYNAAAYYITETGIWKAVMCRHYKRNAFLGALKSFLNAAHYTNWKFIYNSTAAALYWYKKAALLRYKCGKNSLMKFLQGSVNAAGYNTFYIEFKAAAMLETLNNTEYNAAATCVSHRGLYGLQDKILDHYKSYFGMSLISFKAASLMKFLQGSVNAILYAHIQCLGAAAKLFLKGVPKNAALTNILNVLKNAAACQDKILEHYKAAALLQQYCLYLNAKQGAMLAVFKKAAAVFTFPHAFPFNHYTNWTHIY

SEQ ID NO: 3536 - DNA, 1791 bp, Human papillomavirus
aaactgcaggccgccaccatgggcatgcaggtgcagatccagagcctgttcctgctcctgctgtgggtgccaggaagcagaggcctccaggacaagattattgatcactacaaagtgacatacaattctgaagtccaacggaacatcagcttcgccggcattgtcactaagaaactgtatggagtgtccttctccgagctgaagctcctgagcaagctcctctgcgtcaacgctgtgtttactttcccaaatcccttcccatttaacgccgcaaagtccgccattgtgacactgacctacaaggctgccgccaccatgtgcagacactataagaggaacgccgctgcctactacatgactgacgctggcacttggaatgccgccatcttcggcgtcaaccctacagtgaaagccgctgccaagttcgtggctgcctggaccctgaaggctgccgctaagctgctggagaaactcctctgcatcaatacaggcatcctcactgtgacatacggcgcagccgcccaggtggactactacgggctctattataacgctagctactttggcatgtcctttatccatttcaaagcagcctatctgtgcatcgatggacaatgtaccgtcaaggccaccactcccattatccatctgaagaatgtctttgagttccctaatgcctttcctttcaaggccgcagcagtggcatgggacagcgtgtactacatgaaggcctatgtggtgtgggatagcatctactacatcaatgccgccgctaggcaaatgaacatgagccagtggattaagaatgctgctgtcttcaccttcccaaacgagtttcctttcaacgccgctgcttccagcgtggcagcactgtactggtataacgccgcagctagcactgtgtctgtcggcacagccaagaatatgtccatgtctcagtggattaagtatggagcagctaccctgtatgcacacatccagtgtctgaacgtgatggacgactccgaaatcgcatataacgccgcagcttactatatcaccgaaacagggatctggaaagcagtcatgtgtcggcattataagcgcaatgcctttctgggcgcactgaaatccttcctgaacgctgcccactacaccaattggaaattcatctacaacagtaccgccgcagctctctactggtataagaaagccgccctcctgaggtacaagtgtggaaagaactctctgatgaagttcctccaagggtccgtgaacgctgctggatataacacattctatatcgagttcaaagcagccgctatgctcgagacactgaacaataccgagtacaacgctgccgctacctgcgtgagccatcgcgggctgtacggactccaggataagattctcgaccattacaagtcttacttcgggatgtccctgatcagcttcaaggccgcctctctcatgaagtttctgcaaggctctgtgaacgctatcctctatgcccacatccagtgcctgggagccgccgctaaactgttcctgaagggcgtgcctaagaacgcagccctgacaaatattctgaacgtcctgaagaacgccgctgcctgccaggataagattctggagcactacaaggccgctgctctgctgcaacagtactgtctctatctcaacgctaagcagggagccatgctggctgtctttaagaaagcagcagccgtgttcacctttccacacgcattcccctttaaccactacaccaattggactcatatttataaggcggccgcctgaggatccgcg

SEQ ID NO: 3537 - protein, 9 aa, Human papillomavirus
LLQQYCLYL

SEQ ID NO: 3538 - protein, 10 aa, Human papillomavirus
FLQGSVICFV

SEQ ID NO: 3539 - protein, 9 aa, Human papillomavirus
TLQDVSLEV

SEQ ID NO: 3540 - protein, 9 aa, Human papillomavirus
ILYAHIQCL

SEQ ID NO: 3541 - protein, 10 aa, Human papillomavirus
FIQGAVISFV

SEQ ID NO: 3542 - protein, 9 aa, Human papillomavirus
VAWDSVYYM

SEQ ID NO: 3543 - protein, 9 aa, Human papillomavirus
KLLEKLLCI

SEQ ID NO: 3544 - protein, 9 aa, Human papillomavirus
YTNWKFIYL

SEQ ID NO: 3545 - protein, 10 aa, Human papillomavirus
YLCIDGQCTV

SEQ ID NO: 3546 - protein, 9 aa, Human papillomavirus
AIFGVNPTV

SEQ ID NO: 3547 - protein, 9 aa, Human papillomavirus
TLYAHIQCL

SEQ ID NO: 3548 - protein, 10 aa, Human papillomavirus
YVVWDSIYYI

SEQ ID NO: 3549 - protein, 9 aa, Human papillomavirus
RLECAIYYK

SEQ ID NO: 3550 - protein, 9 aa, Human papillomavirus
LTYDSEWQR

SEQ ID NO: 3551 - protein, 10 aa, Human papillomavirus
STAAALYWYK

SEQ ID NO: 3552 - protein, 10 aa, Human papillomavirus
QVVPAYNISK

SEQ ID NO: 3553 - protein, 9 aa, Human papillomavirus
TVSATQLVK

SEQ ID NO: 3554 - protein, 9 aa, Human papillomavirus
STVSVGTAK

SEQ ID NO: 3555 - protein, 9 aa, Human papillomavirus
NTMHYTNWK

SEQ ID NO: 3556 - protein, 9 aa, Human papillomavirus
ISFAGIVTK

SEQ ID NO: 3557 - protein, 9 aa, Human papillomavirus
ATTPIIHLK

SEQ ID NO: 3558 - protein, 9 aa, Human papillomavirus
VTYNSEVQR

SEQ ID NO: 3559 - protein, 9 aa, Human papillomavirus
AVMCRHYKR

SEQ ID NO: 3560 - protein, 10 aa, Human papillomavirus
RQMNMSQWIK

SEQ ID NO: 3561 - protein, 9 aa, Human papillomavirus
MSMSQWIKY

SEQ ID NO: 3562 - protein, 9 aa, Human papillomavirus
QVDYYGLYY

SEQ ID NO: 3563 - protein, 9 aa, Human papillomavirus
KSAIVTLTY

SEQ ID NO: 3564 - protein, 9 aa, Human papillomavirus
SSVAALYWY

SEQ ID NO: 3565 - protein, 9 aa, Human papillomavirus
LQDKIIDHY

SEQ ID NO: 3566 - protein, 10 aa, Human papillomavirus
ATCVSHRGLY

SEQ ID NO: 3567 - protein, 9 aa, Human papillomavirus
VMDDSEIAY

SEQ ID NO: 3568 - protein, 9 aa, Human papillomavirus
CQDKILEHY

SEQ ID NO: 3569 - protein, 10 aa, Human papillomavirus
MLETLNNTEY

SEQ ID NO: 3570 - protein, 9 aa, Human papillomavirus
LQDKILDHY

SEQ ID NO: 3571 - protein, 9 aa, Human papillomavirus
NTGILTVTY

SEQ ID NO: 3572 - protein, 9 aa, Human papillomavirus
HYTNWTHIY

SEQ ID NO: 3573 - protein, 9 aa, Human papillomavirus
LYGVSFSEL

SEQ ID NO: 3574 - protein, 10 aa, Human papillomavirus
VFTFPNEFPF

SEQ ID NO: 3575 - protein, 9 aa, Human papillomavirus
YYMTDAGTW

SEQ ID NO: 3576 - protein, 9 aa, Human papillomavirus
GYNTFYIEF

SEQ ID NO: 3577 - protein, 10 aa, Human papillomavirus
SYFGMSFIHF

SEQ ID NO: 3578 - protein, 10 aa, Human papillomavirus
VFEFPNAFPF

SEQ ID NO: 3579 - protein, 9 aa, Human papillomavirus
HYTNWKFIY

SEQ ID NO: 3580 - protein, 10 aa, Human papillomavirus
PYLHSRLVVF

SEQ ID NO: 3581 - protein, 10 aa, Human papillomavirus
VFTFPNPFPF

SEQ ID NO: 3582 - protein, 9 aa, Human papillomavirus
YYITETGIW

SEQ ID NO: 3583 - protein, 10 aa, Human papillomavirus
VFTFPHAFPF

SEQ ID NO: 3584 - protein, 9 aa, Human papillomavirus
LLQQYCLYL

SEQ ID NO: 3585 - protein, 9 aa, Human papillomavirus
KLLSKLLCV

SEQ ID NO: 3586 - protein, 10 aa, Human papillomavirus
SLMKFLQGSV

SEQ ID NO: 3587 - protein, 9 aa, Human papillomavirus
ILYAHIQCL

SEQ ID NO: 3588 - protein, 9 aa, Human papillomavirus
FLGALKSFL

SEQ ID NO: 3589 - protein, 9 aa, Human papillomavirus
VAWDSVYYM

SEQ ID NO: 3590 - protein, 9 aa, Human papillomavirus
KLLEKLLCI

SEQ ID NO: 3591 - protein, 9 aa, Human papillomavirus
YTNWKFIYL

SEQ ID NO: 3592 - protein, 10 aa, Human papillomavirus
YLCIDGQCTV

SEQ ID NO: 3593 - protein, 9 aa, Human papillomavirus
AIFGVNPTV

SEQ ID NO: 3594 - protein, 9 aa, Human papillomavirus
TLYAHIQCL

SEQ ID NO: 3595 - protein, 10 aa, Human papillomavirus
YVVWDSIYYI

SEQ ID NO: 3596 - protein, 9 aa, Human papillomavirus
LTNILNVLK

SEQ ID NO: 3597 - protein, 9 aa, Human papillomavirus
ATMCRHYKR

SEQ ID NO: 3598 - protein, 10 aa, Human papillomavirus
STAAALYWYK

SEQ ID NO: 3599 - protein, 10 aa, Human papillomavirus
KQGAMLAVFK

SEQ ID NO: 3600 - protein, 9 aa, Human papillomavirus
ALLRYKCGK

SEQ ID NO: 3601 - protein, 9 aa, Human papillomavirus
STVSVGTAK

SEQ ID NO: 3602 - protein, 9 aa, Human papillomavirus
KLFLKGVPK

SEQ ID NO: 3603 - protein, 9 aa, Human papillomavirus
ISFAGIVTK

SEQ ID NO: 3604 - protein, 9 aa, Human papillomavirus
ATTPIIHLK

SEQ ID NO: 3605 - protein, 9 aa, Human papillomavirus
VTYNSEVQR

SEQ ID NO: 3606 - protein, 9 aa, Human papillomavirus
AVMCRHYKR

SEQ ID NO: 3607 - protein, 10 aa, Human papillomavirus
RQMNMSQWIK

SEQ ID NO: 3608 - protein, 9 aa, Human papillomavirus
MSMSQWIKY

SEQ ID NO: 3609 - protein, 9 aa, Human papillomavirus
QVDYYGLYY

SEQ ID NO: 3610 - protein, 9 aa, Human papillomavirus
KSAIVTLTY

SEQ ID NO: 3611 - protein, 9 aa, Human papillomavirus
SSVAALYWY

SEQ ID NO: 3612 - protein, 9 aa, Human papillomavirus
LQDKIIDHY

SEQ ID NO: 3613 - protein, 10 aa, Human papillomavirus
ATCVSHRGLY

SEQ ID NO: 3614 - protein, 9 aa, Human papillomavirus
VMDDSEIAY

SEQ ID NO: 3615 - protein, 9 aa, Human papillomavirus
CQDKILEHY

SEQ ID NO: 3616 - protein, 10 aa, Human papillomavirus
MLETLNNTEY

SEQ ID NO: 3617 - protein, 9 aa, Human papillomavirus
LQDKILDHY

SEQ ID NO: 3618 - protein, 9 aa, Human papillomavirus
NTGILTVTY

SEQ ID NO: 3619 - protein, 9 aa, Human papillomavirus
HYTNWTHIY

SEQ ID NO: 3620 - protein, 9 aa, Human papillomavirus
LYGVSFSEL

SEQ ID NO: 3621 - protein, 10 aa, Human papillomavirus
VFTFPNEFPF

SEQ ID NO: 3622 - protein, 9 aa, Human papillomavirus
YYMTDAGTW

SEQ ID NO: 3623 - protein, 9 aa, Human papillomavirus
GYNTFYIEF

SEQ ID NO: 3624 - protein, 10 aa, Human papillomavirus
SYFGMSFIHF

SEQ ID NO: 3625 - protein, 10 aa, Human papillomavirus
VFEFPNAFPF

SEQ ID NO: 3626 - protein, 9 aa, Human papillomavirus
HYTNWKFIY

SEQ ID NO: 3627 - protein, 10 aa, Human papillomavirus
SYFGMSLISF

SEQ ID NO: 3628 - protein, 10 aa, Human papillomavirus
VFTFPNPFPF

SEQ ID NO: 3629 - protein, 9 aa, Human papillomavirus
YYITETGIW

SEQ ID NO: 3630 - protein, 10 aa, Human papillomavirus
VFTFPHAFPF

SEQ ID NO: 3631 - protein, 9 aa, Human papillomavirus
LLQQYCLYL

SEQ ID NO: 3632 - protein, 10 aa, Human papillomavirus
FLQGSVICFV

SEQ ID NO: 3633 - protein, 9 aa, Human papillomavirus
KLLSKLLCV

SEQ ID NO: 3634 - protein, 9 aa, Human papillomavirus
ILYAHIQCL

SEQ ID NO: 3635 - protein, 10 aa, Human papillomavirus
FIQGAVISFV

SEQ ID NO: 3636 - protein, 9 aa, Human papillomavirus
VAWDSVYYM

SEQ ID NO: 3637 - protein, 9 aa, Human papillomavirus
KLLEKLLCI

SEQ ID NO: 3638 - protein, 9 aa, Human papillomavirus
YTNWKFIYL

SEQ ID NO: 3639 - protein, 10 aa, Human papillomavirus
YLCIDGQCTV

SEQ ID NO: 3640 - protein, 9 aa, Human papillomavirus
AIFGVNPTV

SEQ ID NO: 3641 - protein, 9 aa, Human papillomavirus
TLYAHIQCL

SEQ ID NO: 3642 - protein, 10 aa, Human papillomavirus
YVVWDSIYYI

SEQ ID NO: 3643 - protein, 10 aa, Human papillomavirus
KSLFGMSLMK

SEQ ID NO: 3644 - protein, 9 aa, Human papillomavirus
SVICFVNSK

SEQ ID NO: 3645 - protein, 10 aa, Human papillomavirus
STAAALYWYK

SEQ ID NO: 3646 - protein, 10 aa, Human papillomavirus
QVVPAYNISK

SEQ ID NO: 3647 - protein, 10 aa, Human papillomavirus
KQGAMLAVFK

SEQ ID NO: 3648 - protein, 9 aa, Human papillomavirus
STVSVGTAK

SEQ ID NO: 3649 - protein, 9 aa, Human papillomavirus
NTMHYTNWK

SEQ ID NO: 3650 - protein, 9 aa, Human papillomavirus
ISFAGIVTK

SEQ ID NO: 3651 - protein, 9 aa, Human papillomavirus
ATTPIIHLK

SEQ ID NO: 3652 - protein, 9 aa, Human papillomavirus
VTYNSEVQR

SEQ ID NO: 3653 - protein, 9 aa, Human papillomavirus
AVMCRHYKR

SEQ ID NO: 3654 - protein, 10 aa, Human papillomavirus
RQMNMSQWIK

SEQ ID NO: 3655 - protein, 8 aa, Human papillomavirus
MSMQWIKY

SEQ ID NO: 3656 - protein, 9 aa, Human papillomavirus
QVDYYGLYY

SEQ ID NO: 3657 - protein, 9 aa, Human papillomavirus
KSAIVTLTY

SEQ ID NO: 3658 - protein, 9 aa, Human papillomavirus
SSVAALYWY

SEQ ID NO: 3659 - protein, 9 aa, Human papillomavirus
LQDKIIDHY

SEQ ID NO: 3660 - protein, 10 aa, Human papillomavirus
ATCVSHRGLY

SEQ ID NO: 3661 - protein, 9 aa, Human papillomavirus
VMDDSEIAY

SEQ ID NO: 3662 - protein, 9 aa, Human papillomavirus
CQDKILEHY

SEQ ID NO: 3663 - protein, 10 aa, Human papillomavirus
MLETLNNTEY

SEQ ID NO: 3664 - protein, 9 aa, Human papillomavirus
LQDKILDHY

SEQ ID NO: 3665 - protein, 9 aa, Human papillomavirus
NTGILTVTY

SEQ ID NO: 3666 - protein, 9 aa, Human papillomavirus
HYTNWTHIY

SEQ ID NO: 3667 - protein, 9 aa, Human papillomavirus
LYGVSFSEL

SEQ ID NO: 3668 - protein, 10 aa, Human papillomavirus
VFTFPNEFPF

SEQ ID NO: 3669 - protein, 9 aa, Human papillomavirus
YYMTDAGTW

SEQ ID NO: 3670 - protein, 9 aa, Human papillomavirus
GYNTFYIEF

SEQ ID NO: 3671 - protein, 10 aa, Human papillomavirus
SYFGMSFIHF

SEQ ID NO: 3672 - protein, 10 aa, Human papillomavirus
VFEFPNAFPF

SEQ ID NO: 3673 - protein, 9 aa, Human papillomavirus
HYTNWKFIY

SEQ ID NO: 3674 - protein, 10 aa, Human papillomavirus
PYLHSRLVVF

SEQ ID NO: 3675 - protein, 10 aa, Human papillomavirus
VFTFPNPFPF

SEQ ID NO: 3676 - protein, 9 aa, Human papillomavirus
YYITETGIW

SEQ ID NO: 3677 - protein, 10 aa, Human papillomavirus
VFTFPHAFPF

SEQ ID NO: 3678 - DNA, 969 bp, Human papillomavirus
ggagcggccgccaggctgaacgtgtgccaggacaagatcctgacccattacgagaacggcccagggcccggagtggtcacaattcctaacagcgtgcagatctccgtcggatacatggggcctggcccaggacccgagtggattgaaagacagacagtgctccagcacagcttcaacggcccaggacccgggaagaggcggaaactctgcagcggcaacaccacacccatcattcacgggcccggccctgggccagagtggattcagagacaaactgtgctgcagcatagcttcaacggtcccggcccaggattcaagaccctgattcagccctttatcctgtacgcccacatccaggggcccggccctggaagcgtctactatatgaccgacgccggcacatgggacaagaccgccggcccaggacctggcaacggctggttctacgtggaggccgtcatcgaccggcagaccggcggaccaggccccggtggcctgtactatgtgcacgagggcatcaggacctacttcgtgcaggggccaggacctggcatccacttcctgcaaggcgccattatcagctttgtcaattccaacggacctggtcccgggcccatcaacattagcaagtccaaagcccataaggctatcgaactgggacccggcccagggctgtactggtacaaaaccggcatcagcaacatttccgaggtgtacgggcctggcccaggagctaaggccctccaggctatcgagctccaaatgatgctggagaccggccctggacccggcctgaacaccgtgaagatcccaaacaccgtctccgtgagcactgggggaccagggcccggcatcgagttcattacctttctgggcgccctcaagagcttcctgaaagggcctggaccaggcaaggtggccatgctcgacgatgctacacatacttgctggacctattgaggatccgcg

SEQ ID NO: 3679 - protein, 319 aa, Human papillomavirus
GAAARLNVCQDKILTHYENGPGPGVVTIPNSVQISVGYMGPGPGPEWIERQTVLQHSFNGPGPGKRRKLCSGNTTPIIHGPGPGPEWIQRQTVLQHSFNGPGPGFKTLIQPFILYAHIQGPGPGSVYYMTDAGTWDKTAGPGPGNGWFYVEAVIDRQTGGPGPGGLYYVHEGIRTYFVQGPGPGIHFLQGAIISFVNSNGPGPGPINISKSKAHKAIELGPGPGLYWYKTGISNISEVYGPGPGAKALQAIELQMMLETGPGPGLNTVKIPNTVSVSTGGPGPGIEFITFLGALKSFLKGPGPGKVAMLDDATHTCWTY

SEQ ID NO: 3680 - DNA, 2724 bp, Human papillomavirus
gccgccaccatgggcatgcaggtgcagatccagagcctgttcctgctcctgctgtgggtgccaggaagcagaggccaggtcgactactatggactgtactataacgccgctgccagcaccgtgtccgtgggcaccgccaagaacgtggcctgggactccgtctactatatgaaggccgcactcacctacgatagcgaatggcagagaaacgcagccgcaaagttcgtcgccgcttggacactgaaggctgccgcaaaagccatcttcggcgtgaacccaaccgtgaaagccgcagctctgctccagcaatactgcctgtacctgaactactatatgaccgacgccggcacctggaatgcagtgacctacaacagcgaggtgcagcggaacgccgctctgcaagataagatcctggaccactacaaggcagcagctccctacctgcacagcagactcgtcgtgttcaacgccgctgccacctgcgtcagccaccggggcctgtacaccctgtacgcccatatccagtgcctgaacactatgcactacaccaactggaagaacgccttcctccagggctccgtcatctgcttcgtgaaggccgcagtgatggacgatagcgagatcgcctacaatgcagctaagtccgccattgtcacactgacatacaaggtgttcaccttccctaaccccttccccttcaacagcaccgccgcagctctgtactggtacaagaaagctgccgctaagctgctggagaagctgctctgcatcaacggctacaacactttctacatcgagttcaaggccgcagccgtgatgtgccggcactacaagagaaaccactacaccaactggacacacatctacggagccgctgccatcctgtacgcccacattcagtgcctgaacgcagccgcaaggcagatgaacatgagccagtggatcaagaacgccgcatacaccaactggaagttcatctacctgaacgcctgtcaggacaaaatcctggagcactacaagattagcttcgccggaatcgtgactaagaaatactacatcaccgagaccggaatctggaagagctccgtcgccgcactgtactggtacaacgccgctgccagctacttcggcatgagcttcatccacttcaaagccgcagccctgtacggagtgagctttagcgaactgaaggccgcacaggtggtccccgcctacaacatcagcaagaactacgtggtctgggacagcatttactacatcaacgccttcatccagggcgccgtgatcagcttcgtgaaagccgcagtgttcaccttccctcacgccttcccttttggcgccgctgccgtgtttaccttccccaatgagtttcccttcggcgccgcagccctccaggacaagatcattgatcactacaaggccgcatacctgtgcatcgacggccagtgcaccgtgaaggccagactggagtgcgccatctactacaagaacgccaccgtgtccgccacccagctggtgaagaacatgagcatgagccagtggatcaagtacaaccattacaccaactggaaatttatctacaacgccgccaccacacccatcatccacctcaagaacgccatgctggagaccctgaacaacaccgagtacggagccgccgccgtgttcgagttccccaacgccttcccattcaaggccgccaccctccaggacgtgagcctggaggtgaacaccggaatcctgaccgtgacctacggagcggccgccaggctgaacgtgtgccaggacaagatcctgacccattacgagaacggcccagggcccggagtggtcacaattcctaacagcgtgcagatctccgtcggatacatggggcctggcccaggacccgagtggattgaaagacagacagtgctccagcacagcttcaacggcccaggacccgggaagaggcggaaactctgcagcggcaacaccacacccatcattcacgggcccggccctgggccagagtggattcagagacaaactgtgctgcagcatagcttcaacggtcccggcccaggattcaagaccctgattcagccctttatcctgtacgcccacatccaggggcccggccctggaagcgtctactatatgaccgacgccggcacatgggacaagaccgccggcccaggacctggcaacggctggttctacgtggaggccgtcatcgaccggcagaccggcggaccaggccccggtggcctgtactatgtgcacgagggcatcaggacctacttcgtgcaggggccaggacctggcatccacttcctgcaaggcgccattatcagctttgtcaattccaacggacctggtcccgggcccatcaacattagcaagtccaaagcccataaggctatcgaactgggacccggcccagggctgtactggtacaaaaccggcatcagcaacatttccgaggtgtacgggcctggcccaggagctaaggccctccaggctatcgagctccaaatgatgctggagaccggccctggacccggcctgaacaccgtgaagatcccaaacaccgtctccgtgagcactgggggaccagggcccggcatcgagttcattacctttctgggcgccctcaagagcttcctgaaagggcctggaccaggcaaggtggccatgctcgacgatgctacacatacttgctggacctattgaggatccgcg

SEQ ID NO: 3681 - protein, 926 aa, Human papillomavirus
AATMGMQVQIQSLFLLLLWVPGSRGQVDYYGLYYNAAASTVSVGTAKNVAWDSVYYMKAALTYDSEWQRNAAAKFVAAWTLKAAAKAIFGVNPTVKAAALLQQYCLYLNYYMTDAGTWNAVTYNSEVQRNAALQDKILDHYKAAAPYLHSRLVVFNAAATCVSHRGLYTLYAHIQCLNTMHYTNWKNAFLQGSVICFVKAAVMDDSEIAYNAAKSAIVTLTYKVFTFPNPFPFNSTAAALYWYKKAAAKLLEKLLCINGYNTFMGMQVQIQSLFLLLLWVPGSRGYIEFKAAAVMCRHYKRNHYTNWTHIYGAAAILYAHIQCLNAAARQMNMSQWIKNAAYTNWKFIYLNACQDKILEHYKISFAGIVTKKYYITETGIWKSSVAALYWYNAAASYFGMSFIHFKAAALYGVSFSELKAAQVVPAYNISKNYVVWDSIYYINAFIQGAVISFVKAAVFTFPHAFPFGAAAVFTFPNEFPFGAAALQDKIIDHYKAAYLCIDGQCTVKARLECAIYYKNATVSATQLVKNMSMSQWIKYNHYTNWKFIYNAATTPIIHLKNAMLETLNNTEYGAAAVFEFPNAFPFKAATLQDVSLEVNTGILTVTYGAAARLNVCQDKILTHYENGPGPGVVTIPNSVQISVGYMGPGPGPEWIERQTVLQHSFNGPGPGKRRKLCSGNTTPIIHGPGPGPEWIQRQTVLQHSFNGPGPGFKTLIQPFILYAHIQGPGPGSVYYMTDAGTWDKTAGPGPGNGWFYVEAVIDRQTGGPGPGGLYYVHEGIRTYFVQGPGPGIHFLQGAIISFVNSNGPGPGPINISKSKAHKAIELGPGPGLYWYKTGISNISEVYGPGPGAKALQAIELQMMLETGPGPGLNTVKIPNTVSVSTGGPGPGIEFITFLGALKSFLKGPGPGKVAMLDDATHTCWTY

SEQ ID NO: 3682 - protein, 337 aa, Human papillomavirus
LDLQPETTDLYCYEQGPGPGTGRCIACWRRPRTETGPGPGTNTGLYNLLIRCLRCQGPGPGEIVLHLEPQNELDPVGPGPGQERPRKLPQLCTELQGPGPGEVFEFAFKDLFVVYRGPGPGFHSIAGQYRGQCNTCGPGPGLCIVYRDCIAYAACHGPGPGFQQLFLNTLSFVCPWGPGPGIRILQELLMGSFGIVGPGPGQRFHNIRGRWTGRCMGPGPGVLDFAFTDLTIVYRDGPGPGLFVVYRDSIPHAACHKGPGPGLRTLQQLFLSTLSFVGPGPGIRTLEDLLMGTLGIVGPGPGWYRYSVYGTTLEKLTGPGPGEPDRAHYNIVTFCCK

SEQ ID NO: 3683 - DNA, 1035 bp, Human papillomavirus
ggcgcggccgccctggacctgcagcctgagacaaccgatctgtactgctatgagcagggcccaggacccgggaccggcaggtgtatcgcctgctggagacggcctaggacagagaccggaccagggcccggcacaaataccggactgtacaatctgctcatcagatgtctgaggtgccaagggcccggccctggagagattgtgctgcacctggagccacagaacgagctggaccccgtggggcctggcccaggacaggagaggcccagaaagctgcctcagctgtgcaccgagctgcagggaccaggccccggtgaggtgttcgaatttgccttcaaggatctgtttgtggtctacagggggcctggcccaggattccacagcatcgctgggcagtatagaggccagtgcaacacctgtggacctggtcccgggctgtgcatcgtctaccgggactgcatcgcctacgccgcatgccacggccccggacccggatttcagcagctgttcctgaacaccctgagcttcgtgtgcccctggggccctggcccaggcatcagaattctccaggagctgctcatgggcagcttcggaatcgtggggcccggccctgggcagagattccacaacatcaggggcagatggaccgggcggtgcatgggcccagggcccggagtgctggactttgccttcactgatctgaccattgtgtacagggacgggcctggaccaggcctgttcgtcgtgtaccgggatagcatccctcacgccgcatgccacaagggcccaggccccggcctgagaaccctgcagcagctcttcctgagcaccctgtccttcgtgggccccggacccggaatcagaacactggaggacctgctcatgggcaccctgggaatcgtggggccaggacctggctggtacaggtattccgtgtacgggaccactctggagaaactgaccggacccggcccaggggagcctgacagagcccactacaacatcgtgacattctgctgtaagtgataaggatcc

SEQ ID NO: 3684 - protein, 9 aa, Human papillomavirus
VLAEAMSQV

SEQ ID NO: 3685 - protein, 9 aa, Human papillomavirus
ILKEPVHGV

SEQ ID NO: 3686 - protein, 9 aa, Human papillomavirus
TLNFPISPI

SEQ ID NO: 3687 - protein, 10 aa, Human papillomavirus
SLLNATDIAV

SEQ ID NO: 3688 - protein, 10 aa, Human papillomavirus
QMAVFIHNFK

SEQ ID NO: 3689 - protein, 11 aa, Human papillomavirus
VTVYYGVPVWK

SEQ ID NO: 3690 - protein, 9 aa, Human papillomavirus
FPVRPQVPL

SEQ ID NO: 3691 - protein, 10 aa, Human papillomavirus
YPLASLRSLF

SEQ ID NO: 3692 - protein, 10 aa, Human papillomavirus
VIYQYMDDLY

SEQ ID NO: 3693 - protein, 9 aa, Human papillomavirus
IYQEPFKNL

SEQ ID NO: 3694 - protein, 9 aa, Human papillomavirus
IWGCSGKLI

SEQ ID NO: 3695 - protein, 9 aa, Human papillomavirus
VLAEAMSQV

SEQ ID NO: 3696 - protein, 9 aa, Human papillomavirus
ILKEPVHGV

SEQ ID NO: 3697 - protein, 9 aa, Human papillomavirus
TLNFPISPI

SEQ ID NO: 3698 - protein, 10 aa, Human papillomavirus
SLLNATDIAV

SEQ ID NO: 3699 - protein, 10 aa, Human papillomavirus
QMAVFIHNFK

SEQ ID NO: 3700 - protein, 11 aa, Human papillomavirus
VTVYYGVPVWK

SEQ ID NO: 3701 - protein, 9 aa, Human papillomavirus
FPVRPQVPL

SEQ ID NO: 3702 - protein, 10 aa, Human papillomavirus
YPLASLRSLF

SEQ ID NO: 3703 - protein, 10 aa, Human papillomavirus
VIYQYMDDLY

SEQ ID NO: 3704 - protein, 9 aa, Human papillomavirus
IYQEPFKNL

SEQ ID NO: 3705 - protein, 9 aa, Human papillomavirus
IWGCSGKLI

1. A polynucleotide selected from the group consisting of:
(a) a multi-epitope construct comprising nucleic acids encoding the human papillomavirus (HPV) cytotoxic T lymphocyte (CTL) epitopes HPV16.E1.214, HPV16.E1.254, HPV16.E1.314, HPV16.E1.420, HPV16.E1.585, HPV16.E2.130, HPV16.E2.329, HPV16/52.E2.151, HPV18.E1.592, HPV18.E2.136, HPV18.E2.142, HPV18.E2.15, HPV18.E2.154, HPV18.E2.168, HPV18.E2.230, HPV18/45.E1.321, HPV18/45.E1.491, HPV31.E1.272, HPV31.E1.349, HPV31.E1.565, HPV31.E2.11, HPV31.E2.130, HPV31.E2.138, HPV31.E2.205, HPV31.E2.291, HPV31.E2.78, HPV45.E1.232, HPV45.E1.252, HPV45.E1.399, HPV45.E1.411, HPV45.E1.578, HPV45.E2.137, HPV45.E2.144, HPV45.E2.17, HPV45.E2.332, and HPV45.E2.338, wherein the nucleic acids are directly or indirectly joined to one another in the same reading frame;
(b) the multi-epitope construct of (a), further comprising nucleic acids encoding the human papillomavirus (HPV) cytotoxic T lymphocyte (CTL) epitopes HPV16.E1.493, HPV31/52.E1.557, HPV31.E2.131, HPV31.E2.127, HPV16.E2.335, HPV16.E2.37, HPV16.E2.93, HPV18.E2.211, HPV18.E2.61, HPV18.E1.266, and HPV18.E1.500, directly or indirectly joined in the same reading frame to said CTL epitope nucleic acids of (a);
(c) the multi-epitope construct of (a), further comprising nucleic acids encoding the human papillomavirus (HPV) cytotoxic T lymphocyte (CTL) epitopes HPV16.E1.191, HPV16.E1.292, HPV16.E1.489, HPV16.E1.489, HPV16/52.E1.406, HPV18.E1.210, HPV18.E1.266, HPV18.E1.463, HPV31.E1.464, HPV18/45.E1.284, and HPV31.E1.441 directly or indirectly joined in the same reading frame to said CTL epitope nucleic acids of (a);
(d) the multi-epitope construct of (a), further comprising nucleic acids encoding the human papillomavirus (HPV) cytotoxic T lymphocyte (CTL) epitopes HPV16.E1.191, HPV16.E1.292, HPV16.E1.489, HPV16.E1.489, HPV16/52.E1.406, HPV18.E1.210, HPV18.E1.266, HPV18.E1.463, HPV31.E1.464, HPV18/45.E1.284, and HPV31.E1.441 directly or indirectly joined in the same reading frame to said CTL epitope nucleic acids of (a);
(e) a multi-epitope construct comprising nucleic acids encoding the human papillomavirus (HPV) cytotoxic T lymphocyte (CTL) epitopes HPV16.E6.106, HPV16.E6.29.L2, HPV16.E6.68.R10, HPV16.E6.75.F9, HPV16.E6.75.L2, HPV16.E6.77, HPV16.E6.80.D3, HPV16.E7.11.V10, HPV16.E7.2.T2, HPV16.E7.56.F10, HPV16.E7.86.V8, HPV18.E6.24, HPV18.E6.25.T2, HPV18.E6.53.K10, HPV18.E6.72.D3, HPV18.E6.83.R10, HPV18.E6.84.V10, HPV18.E6.89, HPV18.E6.92.V10, HPV18.E7.59.R9, HPV18/45.E6.13, HPV18/45.E6.98.F9, HPV31.E6.132.K10, HPV31.E6.15, HPV31.E6.72, HPV31.E6.73 D3, HPV31.E6.80, HPV31.E6.82R9, HPV31.E6.83, HPV31.E6.90, HPV31.E7.44.T2, HPV33.E7.11 V10, HPV45.E6.24, HPV45.E6.25 T2, HPV45.E6.37, HPV45.E6.41.R10, HPV45.E6.44, HPV45.E6.54, HPV45.E6.54. V10, HPV45.E6.71.F10, HPV45.E6.84.R9 and HPV45.E7.20, wherein the nucleic acids are directly or indirectly joined to one another in the same reading frame;
(f) the multi-epitope construct of (e), further comprising nucleic acids encoding the human papillomavirus (HPV) cytotoxic T lymphocyte (CTL) epitopes HPV16.E6.131, HPV18.E6.126.F9, HPV31.E6.69, HPV18.E6.33.F9, directly or indirectly joined in the same reading frame to said CTL epitope nucleic acids of (d);
(g) the the multi-epitope construct of (e), further comprising nucleic acids encoding the human papillomavirus (HPV) cytotoxic T lymphocyte (CTL) epitopes HPV18.E6.33, HPV16.E6.87, HPV18.E6.44, HPV31.E6.69+R@68, directly or indirectly joined in the same reading frame to said CTL epitope nucleic acids of (d);
(h) the multi-epitope construct of (a) or (b) or (c) or (d) or (e) or (f) or (g), further comprising one or more spacer nucleic acids encoding one or more spacer amino acids, directly or indirectly joined in the same reading frame to said CTL epitope nucleic acids;
(i) the multi-epitope construct of (h), wherein said one or more spacer nucleic acids are positioned between the CTL epitope nucleic acids of (a), between the CTL epitope nucleic acids of (b), between the CTL epitope nucleic acids of (c), between the CTL epitope nucleic acids of (d), between the CTL epitope nucleic acids of (a) and (b), between the CTL epitope nucleic acids of (a) and (c), between the CTL epitope nucleic acids of (a) and (d), between the CTL epitope nucleic acids of (e), between the CTL epitope nucleic acids of (f), between the CTL epitope nucleic acids of (g), between the CTL epitope nucleic acids of (e) and (f), or between the CTL epitope nucleic acids of (e) and (g);
(j) the multi-epitope construct of (h) or (i), wherein said one or more spacer nucleic acids each encode 1 to 8 amino acids;
(k) the multi-epitope construct of any of (h) to (j), wherein two or more of said spacer nucleic acids encode different (i.e., non-identical) amino acid sequences;
(l) the multi-epitope construct of any of (h) to (k), wherein two or more of said spacer nucleic acids encode an amino acid sequence different from an amino acid sequence encoded by one or more other spacer nucleic acids;
(m) the multi-epitope construct of any of (h) to (l), wherein two or more of the spacer nucleic acids encodes the identical amino acid sequence;
(n) the multi-epitope construct of any of (h) to (m), wherein one or more of said spacer nucleic acids encode an amino acid sequence comprising or consisting of three consecutive alanine (Ala) residues;
(o) the multi-epitope construct of any of (a) to (n), further comprising one or more nucleic acids encoding one or more HTL epitopes, directly or indirectly joined in the same reading frame to said CTL epitope nucleic acids and/or said spacer nucleic acids;
(p) the multi-epitope construct of (o), wherein said one or more HTL epitopes comprises a PADRE epitope;
(q) the multi-epitope construct of (o) or (p), wherein said one or more HTL epitopes comprise one or more HPV HTL epitopes;
(r) the multi-epitope construct of (q), wherein said one or more HPV HTL epitopes comprise HPV16.E1.319,HPV16.E1.337, HPV18.E1.258, HPV18.E1.458, HPV18.E2.140, HPV31.E1.015, HPV31.E1.317, HPV31.E2.67, HPV45.E1.484, HPV45.E1.510, and HPV45.E2.352;
(s) the multi-epitope construct of (r), wherein said one or more HPV HTL epitopes further comprise HPV16.E2.156, HPV16.E2.7, HPV18.E2.277, HPV31.E2.354, and HPV45.E2.67;
(t) the multi-epitope construct of (r), wherein said one or more HPV HTL epitopes further comprise HPV16.E2.160, HPV16.E2.19, HPV18.E2.127, HPV18.E2.340, and HPV31.E2.202;
(u) the multi-epitope construct of (q), wherein said one or more HPV HTL epitopes comprise HPV16.E6.13, HPV16.E6.130, HPV16.E7.13, HPV16.E7.46, HPV16.E7.76, HPV18.E6.43, HPV31.E6.132, HPV31.E6.42, HPV31.E6.78, HPV45.E6.127, and HPV45.E7.10;
(v) the multi-epitope construct of (u), wherein said one or more HPV HTL epitopes further comprise HPV18.E6.94, HPV18.E7.78, HPV31.E6.1, HPV31.E7.36, and HPV45.E7.82;
(w) the multi-epitope construct of (u), wherein said one or more HPV HTL epitopes further comprise HPV18.E6.52 and 53, HPV18.E6.94+Q, HPV18.E7.86, HPV31.E7.76, and HPV45.E6.52;
(x) the multi-epitope construct of any of (o) to (w), further comprising one or more spacer nucleic acids encoding one or more spacer amino acids directly or indirectly joined in the same reading frame between a CTL epitope and an HTL epitope or between HTL epitopes;
(y) the multi-epitope construct of (x), wherein said spacer nucleic acid encodes an amino acid sequence selected from the group consisting of: an amino acid sequence comprising or consisting of GPGPG (SEQ ID NO: 1), an amino acid sequence comprising or consisting of PGPGP (SEQ ID NO: 2), an amino acid sequence comprising or consisting of (GP)n (SEQ ID NO: 3), an amino acid sequence comprising or consisting of (PG)n (SEQ ID NO: 4), an amino acid sequence comprising or consisting of (GP)nG (SEQ ID NO: 5), and an amino acid sequence comprising or consisting of (PG)Np (SEQ ID NO: 6), where n is an integer between zero and eleven;
(z) the multi-epitope construct of any of (a) to (y), further comprising one or more MHC Class I and/or MHC Class II targeting nucleic acids;
(aa) the multi-epitope construct of (z), wherein said one or more targeting nucleic acids encode one or more targeting sequences selected from the group consisting of: an Ig kappa signal sequence, a tissue plasminogen activator signal sequence, an insulin signal sequence, an endoplasmic reticulum signal sequence, a LAMP-1 lysosomal targeting sequence, a LAMP-2 lysosomal targeting sequence, an HLA-DM lysosomal targeting sequence, an HLA-DM-association sequence of HLA-DO, an Ig-a cytoplasmic domain, Ig-ss cytoplasmic domain, a Ii protein, an influenza matrix protein, an HCV antigen, and a yeast Ty protein;
(bb) the multi-epitope construct of any of (a) to (aa), which is optimized for CTL and/or HTL epitope processing;
(cc) the multi-epitope construct of any of (a) to (bb), wherein said CTL nucleic acids are sorted to minimize the number of CTL and/or HTL junctional epitopes encoded therein;
(dd) the multi-epitope construct of any of (q) to (cc), wherein said HTL nucleic acids are sorted to minimize the number of CTL and/or HTL junctional epitopes encoded therein;
(ee) the multi-epitope construct of any of (a) to (dd) further comprising one or more nucleic acids encoding one or more flanking amino acid residues;
(ff) the multi-epitope construct of (ee), wherein said one or more flanking amino acid residues are selected from the group consisting of: K, R, N, Q, G, A, S, C, and T at a C+1 position of one of said CTL epitopes;
(gg) the multi-epitope construct of any of (e), (f), (h)-(n), (z)-(cc), (ee) or (ff), wherein said HPV CTL epitopes are directly or indirectly joined in the order shown in Table 47C;
(hh) the multi-epitope construct of any of (e), (g), (h)-(n), (z)-(cc), (ee) or (ff), wherein the HPV CTL epitopes are directly or indirectly joined in the order shown in Table 85;
(ii) the multi-epitope construct of any of (a), (b), (h)-(n), (z)-(cc), (ee) or (ff), wherein the HPV CTL epitopes are directly or indirectly joined in the order shown in Table 52A;
(ii) the multi-epitope construct of any of (a), (b), (h)-(n), (z)-(cc), (ee) or (ff), wherein the HPV CTL epitopes are directly or indirectly joined in the order shown in Table 52B;
(jj) the multi-epitope construct of any of (a), (c), (h)-(n), (z)-(cc), (ee) or (ff), wherein the HPV CTL epitopes are directly or indirectly joined in the order shown in Table 74;
(kk) the multi-epitope construct of any of (a), (c), (h)-(n), (z)-(cc), (ee) or (ff), wherein the HPV CTL epitopes are directly or indirectly joined in the order shown in Table 75;
(ll) the multi-epitope construct of any of (a), (d), (h)-(n), (z)-(cc), (ee) or (ff), wherein the HPV CTL epitopes are directly or indirectly joined in the order shown in Table 83;
(mm) the multi-epitope construct of any of (r), (t), (x)-(bb), (dd) or (ff), wherein the HPV HTL epitopes are directly or indirectly joined in the order shown in Table 58A;
(nn) the multi-epitope construct of any of (r), (t), (x)-(bb), (dd) or (ff), wherein the HPV HTL epitopes are directly or indirectly joined in the order shown in Table 58B;
(oo) the multi-epitope construct of any of (u), (v), (x)-(bb), (dd) or (ff), wherein the HPV HTL epitopes are directly or indirectly joined in the order of the HTL epitopes shown in Table 70;
(pp) the multi-epitope construct of any of (u), (w), (x)-(bb), (dd) or (ff), wherein the HPV HTL epitopes are directly or indirectly joined in the order shown in Table 80;
(qq) the multi-epitope construct of any of (e), (f), (h)-(n), (r), (s), or (x)-(ff), wherein the HPV HTL epitopes are directly or indirectly joined in the order shown in Table 78;
(rr) the multi-epitope construct of (e), (f), (h)-(n), (u), (v), or (x)-(ff), wherein said HPV CTL epitopes and said HPV HTL epitopes are directly or indirectly joined in the order shown in Table 70;
(ss) the multi-epitope construct of (e), (g), (h)-(n), (u), (v), or (x)-(ff), wherein said HPV CTL epitopes and said HPV HTL epitopes are directly or indirectly joined in the order shown in Table 71;
(tt) the multi-epitope construct of (a), (b), (h)-(n), (r), (t), or (x)-(ff), wherein said HPV CTL epitopes and said HPV HTL epitopes are directly or indirectly joined in the order shown in Table 63A;
(uu) the multi-epitope construct of (a), (b), (h)-(n), (r), (t), or (x)-(ff), wherein said HPV CTL epitopes and said HPV HTL epitopes are directly or indirectly joined in the order shown in Table 63C;
(vv) the multi-epitope construct of (a), (b), (h)-(n), (r), (t), or (x)-(ff), wherein said HPV CTL epitopes and said HPV HTL epitopes are directly or indirectly joined in the order shown in Table 63B;
(xx) the multi-epitope construct of (a), (b), (h)-(n), (r), (t), or (x)-(ff), wherein said HPV CTL epitopes and said HPV HTL epitopes are directly or indirectly joined in the order shown in Table 63D;
(yy) the multi-epitope construct of (a), (c), (h)-(n), (r), (s), or (x)-(ff), wherein said HPV CTL epitopes and said HPV HTL epitopes are directly or indirectly joined in the order shown in Table 84;
(zz) the multi-epitope construct of any of (a) to (ff), wherein said construct encodes a polypeptide comprising or consisting of an amino acid sequence selected from the group consisting of: the amino acid sequence shown in Table 50C, the amino acid sequence shown in Table 54A, the amino acid sequence shown in Table 54B, the amino acid sequence shown in Table 59, the amino acid sequence shown in Table 61, the amino acid sequence shown in Table 65A, the amino acid sequence shown in Table 65B, the amino acid sequence shown in Table 65C, the amino acid sequence shown in Table 65D, the amino acid sequence shown in Table 69, the amino acid sequence shown in Table 72A, the amino acid sequence shown in Table 72E, the amino acid sequence shown in Table 73A, the amino acid sequence shown in Table 76A, the amino acid sequence shown in Table 76C, the amino acid sequence shown in Table 79A, the amino acid sequence shown in Table 79B, the amino acid sequence shown in Table 81, and a combination of two or more of said amino acid sequences; and
(aaa) the multi-epitope construct of any of (a) to (ff), wherein said construct comprises a nucleic acid sequence selected from the group consisting of: the nucleotide sequence in Table 49C, the nucleotide sequence in Table 53A, the nucleotide sequence in Table 53B, the nucleotide sequence in Table 59, the nucleotide sequence in Table 61, the nucleotide sequence in Table 64A, the nucleotide sequence in Table 64B, the nucleotide sequence in Table 64C, the nucleotide sequence in Table 64D, the nucleotide sequence in Table 72B, the nucleotide sequence in Table 72F, the nucleotide sequence in Table 73B, the nucleotide sequence in Table 76B, the nucleotide sequence in Table 76D, the nucleotide sequence in Table 79A, the nucleotide sequence in Table 79B, the nucleotide sequence in Table 81, and a combination of two or more of said nucleotide sequences.

2. The multi-epitope construct of claim 1, further comprising one or more regulatory sequences.

3. The multi-epitope construct of claim 2, wherein said one or more regulatory sequences comprises an IRES element.

4. The multi-epitope construct of claim 2, wherein said one or more regulatory sequences comprises a promoter.

5. The multi-epitope construct of claim 4, wherein said promoter is a CMV promoter.

6. A vector comprising the multi-epitope construct of claim 1.

7. The vector of claim 6, wherein said vector is an expression vector.

8. A polynucleotide comprising a first multi-epitope constrcut, and a second multi-epitope construct, each according to claim 1, a first and a second multi-epitope constructs, said first multi-epitope construct comprising a polynucleotide encoding one or more HPV epitopes, and said second multi-epitope construct comprising a polynucleotide encoding one or more HPV HTL epitopes, wherein said first and second multi-epitope constructs are not directly joined, or are not joined in the same frame.

9. The polynucleotide of claim 8, wherein said first and second multi-epitope constructs are operably linked to at least one regulatory sequence.

10. The polynucleotide of claim 9, wherein said at least one regulatory sequence is selected from the group consisting of: a promoter, an IRES element, and a combination thereof.

11. The polynucleotide of claim 10, wherein said promoter is a CMV promoter.

12. The polynucleotide of claim 8, wherein said first and second multi-epitope constructs have a structure selected from the group consisting of the structure shown in any one of Tables 47C, 52B, 58A, 63A-D, 70, 71, 74, 75, 78, 80, 82, 83, 84, 85 and a combination of said structures.

13. The polynucleotide of claim 8, wherein said second multi-epitope construct encodes a polypeptide comprising or consisting of an amino acid sequence selected from the group consisting the amino acid sequence shown in Table 50C, the amino acid sequence shown in Table 54A, the amino acid sequence shown in Table 54B, the amino acid sequence shown in Table 59, the amino acid sequence shown in Table 61, the amino acid sequence shown in Table 65A, the amino acid sequence shown in Table 65B, the amino acid sequence shown in Table 65C, the amino acid sequence shown in Table 65D, the amino acid sequence shown in Table 69, the amino acid sequence shown in Table 72A, the amino acid sequence shown in Table 72E, the amino acid sequence shown in Table 73A, the amino acid sequence shown in Table 76A, the amino acid sequence shown in Table 76C, the amino acid sequence shown in Table 79A, the amino acid sequence shown in Table 79B, the amino acid sequence shown in Table 81, and a combination of two or more of said amino acid sequences.

14. The polynucleotide of claim 8, wherein the second multi-epitope construct comprises a nucleotide sequence selected from the group consisting of: the nucleotide sequence in Table 49C, the nucleotide sequence in Table 53A, the nucleotide sequence in Table 53B, the nucleotide sequence in Table 59, the nucleotide sequence in Table 61, the nucleotide sequence in Table 64A, the nucleotide sequence in Table 64B, the nucleotide sequence in Table 64C, the nucleotide sequence in Table 64D, the nucleotide sequence in Table 72B, the nucleotide sequence in Table 72F, the nucleotide sequence in Table 73B, the nucleotide sequence in Table 76B, the nucleotide sequence in Table 76D, the nucleotide sequence in Table 79A, the nucleotide sequence in Table 79B, the nucleotide sequence in Table 81, and a combination of two or more of said nucleotide sequences.

15. A vector comprising the polynucleotide of claim 8.

16. The vector of claim 15, wherein said vector is an expression vector.

17. A polypeptide comprising an amino acid sequence encoded by the polynucleotide of claim 1

18. The polypeptide of claim 17, which comprises an amino acid sequence selected from the group consisting of: the amino acid sequence shown in Table 50C, the amino acid sequence shown in Table 54A, the amino acid sequence shown in Table 54B, the amino acid sequence shown in Table 59, the amino acid sequence shown in Table 61, the amino acid sequence shown in Table 65A, the amino acid sequence shown in Table 65B, the amino acid sequence shown in Table 65C, the amino acid sequence shown in Table 65D, the amino acid sequence shown in Table 69, the amino acid sequence shown in Table 72A, the amino acid sequence shown in Table 72E, the amino acid sequence shown in Table 73A, the amino acid sequence shown in Table 76A, the amino acid sequence shown in Table 76C, the amino acid sequence shown in Table 79A, the amino acid sequence shown in Table 79B, the amino acid sequence shown in Table 81, and a combination of two or more of said amino acid sequences.

19. A composition comprising the polynucleotide of claim 1; and a carrier.

20. A cell comprising the polynucleotide of claim 1.

21. A method of inducing an immune response against human papillomavirus virus (HPV) in an individual in need thereof, comprising administering to said individual the composition of claim 19.

22. A method of making the polynucleotide of claim 1 comprising culturing the cell of claim 20, and recovering said polynucleotide.
